(19) United States
(12) Patent Application Publication
(10) Pub. No.: US 2025/0122488 A1
(43) Pub. Date: Apr. 17, 2025

(54) ENGINEERED ADENYLATE KINASE VARIANTS

(71) Applicant: Codexis, Inc., Redwood City, CA (US)

(72) Inventors: Stephanie Marie Forget, Redwood City, CA (US); Anders Matthew Knight, Mountain View, CA (US); Marissa Greene MacAvoy, Emerald Hills, CA (US); Simon Ng, San Francisco, CA (US); Nicholas Porter, Redwood City, CA (US); Jonathan Vroom, South San Francisco, CA (US)

(21) Appl. No.: 18/913,751

(22) Filed: Oct. 11, 2024

Related U.S. Application Data
(60) Provisional application No. 63/589,828, filed on Oct. 12, 2023.
(60) Provisional application No. 63/661,366, filed on Jun. 18, 2024.

(51) Int. Cl. C12N 9/12; C12N 9/08; C12N 15/11

(52) U.S. Cl. CPC C12N 9/1229; C12N 9/0065; C12N 15/11; C12N 2310/321; C12N 2310/33; C12Y 111/01006; C12Y 207/04003

(57) ABSTRACT

The present disclosure provides engineered adenylate kinases, and recombinant polynucleotides encoding the engineered adenylate kinases. The present disclosure further provides uses of the engineered adenylate kinases for converting NMP to NDP.

### CROSS REFERENCE TO RELATED APPLICATIONS

[0001] This application claims the benefit of U.S. Provisional Application No. 63/589,828, filed Oct. 12, 2023, and U.S. Provisional Application No. 63/661,366, filed Jun. 18, 2024, each of which is hereby incorporated by reference herein in its entirety for all purposes.

### REFERENCE TO SEQUENCE LISTING, TABLE OR COMPUTER PROGRAM

[0002] The Sequence Listing concurrently submitted herewith as file name CX10-258WO3_ST26.xml, created on Oct. 10, 2024, with a file size of 5,616,375 bytes, is part of the specification and is hereby incorporated by reference herein in its entirety.

### TECHNICAL FIELD

[0003] The present disclosure relates to engineered adenylate kinase variants, polynucleotides encoding the engineered adenylate kinase variants, and uses of the engineered enzymes.

### BACKGROUND

[0004] Adenylate kinase (AK or AdyK) is an ATP:AMP phosphotransferase, an enzyme that belongs to the nucleoside monophosphate (NMPs) kinase family, and mediates the interconversion of adenine nucleotides (ATP+AMP↔2 ADP). The enzyme is ubiquitous in nature, being present in archaea, bacteria, and as well eukarya, with the exception of sulfur bacteria, and is a critical enzyme in energy metabolism and equilibrating adenine nucleotides in vivo. Although ATP is the substrate for most AKs, the human AK isoenzyme 3 uses GTP instead (GTP:AMP phosphotransferase).

[0005] Adenylate kinase can be used as an ATP regenerating system in presence of excess ADP to convert two ADP molecules, one as a phosphate acceptor and the other as a phosphate donor, to produce ATP+AMP. Adenylate kinase is also adaptable for use in enzyme cascades for the conversion of AMP to ADP as well as other NDPs. However, adenylate kinases can display bias in substrate specificity and have different activities towards certain NDP substrates.

### SUMMARY

[0006] The present disclosure provides engineered adenylate kinase enzymes, polynucleotides encoding the engineered adenylate kinase enzymes, and method of using the adenylate kinase enzymes. In some embodiments, the adenylate kinases have been engineered to have an improved property as compared to a reference adenylate kinase.

[0007] In one aspect, the present disclosure provides an engineered adenylate kinase comprising an amino acid sequence having at least 70%, 75%, 80%, 81%, 82%, 83%, 84%, 85%, 86%, 87%, 88%, 89%, 90%, 91%, 92%, 93%, 94%, 95%, 96%, 97%, 98%, 99%, or more sequence identity to a reference sequence corresponding to amino acid residues 12-231 of an even-numbered SEQ ID NO. of SEQ ID NOs: 2-1302, 1356-2652, and 2676-3192, or to a reference sequence corresponding to an even-numbered SEQ ID NO. of SEQ ID NOs: 2-1302, 1356-2652, and 2676-3192, wherein the amino acid sequence comprises one or more substitutions relative to a reference sequence corresponding to amino acid residues 12-231 of SEQ ID NO: 2, 4, 172, 376, 508, 524, 584, 610, 674, 816, 874, 1032, 1388, 1708, 1952, 1980, 2072, 2138, 2294, 2368, 2602, 2832, 2994, or 3104, or relative to a reference sequence corresponding to SEQ ID NO: 2, 4, 172, 376, 508, 524, 584, 610, 674, 816, 874, 1032, 1388, 1708, 1952, 1980, 2072, 2138, 2294, 2368, 2602, 2832, 2994, or 3104.

[0008] In some embodiments, the engineered adenylate kinase comprises an amino acid sequence having at least 70%, 75%, 80%, 81%, 82%, 83%, 84%, 85%, 86%, 87%, 88%, 89%, 90%, 91%, 92%, 93%, 94%, 95%, 96%, 97%, 98%, 99%, or more sequence identity to a reference sequence corresponding to amino acid residues 12-231 of SEQ ID NO: 2, 4, 172, 376, 508, 524, 584, 610, 674, 816, 874, 1032, 1388, 1708, 1952, 1980, 2072, 2138, 2294, 2368, 2602, 2832, 2994, or 3104, or to a reference sequence corresponding to SEQ ID NO: 2, 4, 172, 376, 508, 524, 584, 610, 674, 816, 874, 1032, 1388, 1708, 1952, 1980, 2072, 2138, 2294, 2368, 2602, 2832, 2994, or 3104, wherein the amino acid sequence comprises one or more substitutions relative to the reference sequence corresponding to amino acid residues 12-231 of SEQ ID NO: 2, 4, 172, 376, 508, 524, 584, 610, 674, 816, 874, 1032, 1388, 1708, 1952, 1980, 2072, 2138, 2294, 2368, 2602, 2832, 2994, or 3104, or relative to the reference sequence corresponding to SEQ ID NO: 2, 4, 172, 376, 508, 524, 584, 610, 674, 816, 874, 1032, 1388, 1708, 1952, 1980, 2072, 2138, 2294, 2368, 2602, 2832, 2994, or 3104.

[0009] In some embodiments, the engineered adenylate kinase comprises an amino acid sequence having at least 70%, 75%, 80%, 81%, 82%, 83%, 84%, 85%, 86%, 87%, 88%, 89%, 90%, 91%, 92%, 93%, 94%, 95%, 96%, 97%, 98%, 99%, or more sequence identity to the reference sequence corresponding to amino acid residues 12-231 of SEQ ID NO: 2, or to the reference sequence corresponding to SEQ ID NO: 2, wherein the amino acid sequence comprises one or more substitutions relative to the reference sequence corresponding to amino acid residues 12-231 of SEQ ID NO: 2, or relative to the reference sequence corresponding to SEQ ID NO: 2.

[0010] In some embodiments, the engineered adenylate kinase comprises an amino acid sequence having at least 70%, 75%, 80%, 81%, 82%, 83%, 84%, 85%, 86%, 87%, 88%, 89%, 90%, 91%, 92%, 93%, 94%, 95%, 96%, 97%, 98%, 99%, or more sequence identity to the reference sequence corresponding to amino acid residues 12-231 of SEQ ID NO: 4, 172, 376, 508, 524, 584, 610, 674, 816, 874, 1032, 1388, 1708, 1952, 1980, 2072, 2138, 2294, 2368, 2602, 2832, 2994, or 3104, or to the reference sequence corresponding to SEQ ID NO: 4, 172, 376, 508, 524, 584, 610, 674, 816, 874, 1032, 1388, 1708, 1952, 1980, 2072, 2138, 2294, 2368, 2602, 2832, 2994, or 3104, wherein the amino acid sequence comprises one or more substitutions relative to the reference sequence corresponding to amino acid residues 12-231 of SEQ ID NO: 2, or relative to the reference sequence corresponding to SEQ ID NO: 2.

[0011] In some embodiments, the engineered adenylate kinase comprises an amino acid sequence having at least 70%, 75%, 80%, 81%, 82%, 83%, 84%, 85%, 86%, 87%, 88%, 89%, 90%, 91%, 92%, 93%, 94%, 95%, 96%, 97%, 98%, 99%, or more sequence identity to a reference sequence corresponding to amino acid residues 12-231 of an even-numbered SEQ ID NO. of SEQ ID NOs: 4-1302, 1356-2652, and 2676-3192, or to a reference sequence corresponding to an even-numbered SEQ ID NO. of SEQ ID NOs: 4-1302, 1356-2652, and 2676-3192, wherein the amino acid sequence comprises one or more substitutions relative to the reference sequence corresponding to amino acid residues 12-231 of SEQ ID NO: 2, or relative to the reference sequence corresponding to SEQ ID NO: 2.

[0012] In some embodiments, the amino acid sequence of the engineered adenylate kinase comprises at least a substitution at amino acid position 11, 13, 14, 15, 16, 18, 20, 21, 22, 26, 27, 29, 30, 31, 32, 34, 35, 36, 37, 38, 39, 40, 42, 43, 44, 46, 48, 50, 51, 52, 53, 54, 55, 56, 57, 58, 59, 60, 61, 62, 63, 64, 65, 66, 67, 68, 69, 70, 71, 73, 74, 75, 76, 77, 78, 79, 80, 81, 82, 83, 84, 87, 88, 89, 90, 91, 92, 93, 94, 97, 98, 99, 100, 101, 102, 104, 105, 108, 109, 110, 111, 112, 113, 115, 116, 117, 118, 119, 120, 122, 123, 124, 125, 126, 127, 128, 129, 131, 132, 133, 134, 135, 136, 137, 138, 139, 140, 141, 142, 143, 146, 148, 149, 150, 151, 152, 153, 154, 155, 156, 157, 161, 162, 163, 166, 168, 169, 170, 172, 173, 175, 178, 179, 180, 181, 182, 183, 184, 186, 187, 188, 190, 191, 192, 194, 195, 196, 197, 198, 199, 200, 201, 202, 203, 204, 205, 206, 207, 208, 210, 211, 212, 213, 214, 215, 216, 217, 218, 219, 220, 221, 222, 223, 224, 225, 226, 227, 228, 229, 230, or 231, or combinations thereof, wherein the amino acid positions are relative to the reference sequence corresponding to amino acid residues 12-231 of SEQ ID NO: 2, or relative to the reference sequence corresponding to SEQ ID NO: 2.

[0013] In some embodiments, the amino acid sequence of the engineered adenylate kinase comprises at least a substitution at amino acid position 13, 18, 29, 30, 31, 32, 34, 35, 48, 50, 53, 55, 59, 60, 61, 62, 66, 68, 77, 78, 80, 83, 87, 100, 104, 105, 109, 118, 119, 127, 128, 133, 136, 139, 142, 143, 150, 151, 155, 157, 168, 170, 175, 184, 186, 190, 201, 207, 212, 213, 214, 216, 217, 218, 224, or 226, or combinations thereof, wherein the amino acid positions are relative to the reference sequence corresponding to amino acid residues 12-231 of SEQ ID NO: 2, or relative to the reference sequence corresponding to SEQ ID NO: 2.

[0014] In some embodiments, the amino acid sequence of the engineered adenylate kinase comprises at least a substitution or substitution set at amino acid position(s) 29/30/128/142/186/212/213, 18/142/212/213, 29/30/128/142/186, 40/135/214, 18/29/30/127/150, 82, 69, 118, 29/30, 206, 32, 16, 104, 111/135/136/214, 29/128/175, 178, 18/128/142, 32/108/111/156/191, 18/29/128/129/142/186, 32/133, 18/29/30/212/213/222, 29/65/127, 32/40/43/52/155/156/217, 18/29/128/129, 80, 32/43/138/152/191/214/215, 183, 18/175/186/212/213, 129, 18/29/30/65/129/142/150/186, 127/142/212/213, 30/65/142/222, 40/43/215, 136, 29/150/211/212/213/221, 43/111/136/219, 226, 88, 140/215/216, 32/133/134, or 18/29/128/186, wherein the amino acid positions are relative to the reference sequence corresponding to amino acid residues 12-231 of SEQ ID NO: 2, or relative to the reference sequence corresponding to SEQ ID NO: 2.

[0015] In some embodiments, the amino acid sequence of the engineered adenylate kinase comprises at least one substitution set forth in Tables 7.2, 8.2, 9.2, 10.2, 11.2, 12.1, 13.2, 14.1, 15.2, 16.2, 17.2, 18.2, 19.2, 20.2, 21.2, 23.2, 24.2, 25.2, 26.2, 27.2, 28.2, 29.2, 30.2, 31.2, 32.2, 33.2, 34.2, 35.2, 36.2, 37.2, 38.2, 40.2, 41.2, 42.2, 43.2, 44.2, 45.2, 46.2, 47.2, 48.2, and 49.2, wherein the amino acid positions are relative to the reference sequence corresponding to amino acid residues 12-231 of SEQ ID NO: 2, or relative to the reference sequence corresponding to SEQ ID NO: 2.

[0016] In some embodiments, the amino acid sequence of the engineered adenylate kinase comprises at least a substitution or substitution set of an engineered adenylate kinase variant set forth in Tables 7.2, 8.2, 9.2, 10.2, 11.2, 12.1, 13.2, 14.1, 15.2, 16.2, 17.2, 18.2, 19.2, 20.2, 21.2, 23.2, 24.2, 25.2, 26.2, 27.2, 28.2, 29.2, 30.2, 31.2, 32.2, 33.2, 34.2, 35.2, 36.2, 37.2, 38.2, 40.2, 41.2, 42.2, 43.2, 44.2, 45.2, 46.2, 47.2, 48.2, and 49.2, wherein the amino acid positions are relative to the reference sequence corresponding to amino acid residues 12-231 of SEQ ID NO: 2, or relative to the reference sequence corresponding to SEQ ID NO: 2.

[0017] In some embodiments, the engineered adenylate kinase comprises an amino acid sequence having at least 70%, 75%, 80%, 81%, 82%, 83%, 84%, 85%, 86%, 87%, 88%, 89%, 90%, 91%, 92%, 93%, 94%, 95%, 96%, 97%, 98%, 99% or more sequence identity to a reference amino acid sequence comprising a substitution or substitution set of an engineered adenylate kinase variant set forth in Tables 7.2, 8.2, 9.2, 10.2, 11.2, 12.1, 13.2, 14.1, 15.2, 16.2, 17.2, 18.2, 19.2, 20.2, 21.2, 23.2, 24.2, 25.2, 26.2, 27.2, 28.2, 29.2, 30.2, 31.2, 32.2, 33.2, 34.2, 35.2, 36.2, 37.2, 38.2, 40.2, 41.2, 42.2, 43.2, 44.2, 45.2, 46.2, 47.2, 48.2, and 49.2, wherein the amino acid positions are relative to the reference sequence corresponding to amino acid residues 12-231 of SEQ ID NO: 2, or relative to the reference sequence corresponding to SEQ ID NO: 2.

[0018] In some embodiments, the engineered adenylate kinase comprises an amino acid sequence having at least 70%, 75%, 80%, 81%, 82%, 83%, 84%, 85%, 86%, 87%, 88%, 89%, 90%, 91%, 92%, 93%, 94%, 95%, 96%, 97%, 98%, 99%, or more sequence identity to the reference sequence corresponding to residues 12-231 of SEQ ID NO: 4, 172, 376, 508, 524, 584, 610, 674, 816, 874, 1032, 1388, 1708, 1952, 1980, 2072, 2138, 2294, 2368, 2602, 2832, 2994, or 3104, or to the reference sequence corresponding to SEQ ID NO: 4, 172, 376, 508, 524, 584, 610, 674, 816, 874, 1032, 1388, 1708, 1952, 1980, 2072, 2138, 2294, 2368, 2602, 2832, 2994, or 3104.

[0019] In some embodiments, the engineered adenylate kinase comprises an amino acid sequence having at least 70%, 75%, 80%, 81%, 82%, 83%, 84%, 85%, 86%, 87%, 88%, 89%, 90%, 91%, 92%, 93%, 94%, 95%, 96%, 97%, 98%, 99%, or more sequence identity to a reference sequence corresponding to residues 12-231 of an even-numbered SEQ ID NO. of SEQ ID NOs: 4-1302, 1356-2652, and 2676-3192, or to a reference sequence corresponding to an even-numbered SEQ ID NO. of SEQ ID NOs: 4-1302, 1356-2652, and 2676-3192.

[0020] In some embodiments, the engineered adenylate kinase comprises an amino acid sequence having at least 70%, 75%, 80%, 81%, 82%, 83%, 84%, 85%, 86%, 87%, 88%, 89%, 90%, 91%, 92%, 93%, 94%, 95%, 96%, 97%, 98%, 99%, or more sequence identity to the reference sequence corresponding to residues 12-231 of SEQ ID NO: 4, 172, 376, 508, 524, 584, 610, 674, 816, 874, 1032, 1388, 1708, 1952, 1980, 2072, 2138, 2294, 2368, 2602, 2832, 2994, or 3104, or to the reference sequence corresponding to SEQ ID NO: 4, 172, 376, 508, 524, 584, 610, 674, 816, 874, 1032, 1388, 1708, 1952, 1980, 2072, 2138, 2294, 2368, 2602, 2832, 2994, or 3104, wherein the amino acid sequence comprises one or more substitutions relative to the reference sequence corresponding to residues 12-231 of SEQ ID NO: 4, 172, 376, 508, 524, 584, 610, 674, 816, 874, 1032, 1388, 1708, 1952, 1980, 2072, 2138, 2294, 2368, 2602, 2832, 2994, or 3104, or relative to the reference sequence corresponding to SEQ ID NO: 4, 172, 376, 508, 524, 584, 610, 674, 816, 874, 1032, 1388, 1708, 1952, 1980, 2072, 2138, 2294, 2368, 2602, 2832, 2994, or 3104.

[0021] In some embodiments, the engineered adenylate kinase comprises an amino acid sequence having at least 70%, 75%, 80%, 81%, 82%, 83%, 84%, 85%, 86%, 87%, 88%, 89%, 90%, 91%, 92%, 93%, 94%, 95%, 96%, 97%, 98%, 99%, or more sequence identity to the reference sequence corresponding to residues 12-231 of an even-numbered SEQ ID NO. of SEQ ID NOs: 4-1302, 1356-2652, and 2676-3192, or to the reference sequence corresponding to an even-numbered SEQ ID NO. of SEQ ID NOs: 4-1302, 1356-2652, and 2676-3192, wherein the amino acid sequence comprises one or more substitutions relative to the reference sequence corresponding to residues 12-231 of SEQ ID NO: 4, 172, 376, 508, 524, 584, 610, 674, 816, 874, 1032, 1388, 1708, 1952, 1980, 2072, 2138, 2294, 2368, 2602, 2832, 2994, or 3104, or relative to the reference sequence corresponding to SEQ ID NO: 4, 172, 376, 508, 524, 584, 610, 674, 816, 874, 1032, 1388, 1708, 1952, 1980, 2072, 2138, 2294, 2368, 2602, 2832, 2994, or 3104.

[0022] In some embodiments, the amino acid sequence of the engineered adenylate kinase comprises at least a substitution at amino acid position 11, 13, 14, 15, 16, 18, 20, 21, 22, 26, 27, 29, 30, 31, 32, 34, 35, 36, 37, 38, 39, 40, 42, 43, 44, 46, 48, 50, 51, 52, 53, 54, 55, 56, 57, 58, 59, 60, 61, 62, 63, 64, 65, 66, 67, 68, 69, 70, 71, 73, 74, 75, 76, 77, 78, 79, 80, 81, 82, 83, 84, 87, 88, 89, 90, 91, 92, 93, 94, 97, 98, 99, 100, 101, 102, 104, 105, 108, 109, 110, 111, 112, 113, 115, 116, 117, 118, 119, 120, 122, 123, 124, 125, 126, 127, 128, 129, 131, 132, 133, 134, 135, 136, 137, 138, 139, 140, 141, 142, 143, 146, 148, 149, 150, 151, 152, 153, 154, 155, 156, 157, 161, 162, 163, 166, 168, 169, 170, 172, 173, 175, 178, 179, 180, 181, 182, 183, 184, 186, 187, 188, 190, 191, 192, 194, 195, 196, 197, 198, 199, 200, 201, 202, 203, 204, 205, 206, 207, 208, 210, 211, 212, 213, 214, 215, 216, 217, 218, 219, 220, 221, 222, 223, 224, 225, 226, 227, 228, 229, 230, or 231, or combinations thereof, wherein the amino acid positions are relative to the reference sequence corresponding to residues 12-231 of SEQ ID NO: 4, 172, 376, 508, 524, 584, 610, 674, 816, 874, 1032, 1388, 1708, 1952, 1980, 2072, 2138, 2294, 2368, 2602, 2832, 2994, or 3104, or relative to the reference sequence corresponding to SEQ ID NO: 4, 172, 376, 508, 524, 584, 610, 674, 816, 874, 1032, 1388, 1708, 1952, 1980, 2072, 2138, 2294, 2368, 2602, 2832, 2994, or 3104.

[0023] In some embodiments, the amino acid sequence of the engineered adenylate kinase comprises at least a substitution at amino acid position 13, 18, 29, 30, 31, 32, 34, 35, 48, 50, 53, 55, 59, 60, 61, 62, 66, 68, 77, 78, 80, 83, 87, 100, 104, 105, 109, 118, 119, 127, 128, 133, 136, 139, 142, 143, 150, 151, 155, 157, 168, 170, 175, 184, 186, 190, 201, 207, 212, 213, 214, 216, 217, 218, 224, or 226, or combinations thereof, wherein the amino acid positions are relative to the reference sequence corresponding to residues 12-231 of SEQ ID NO: 4, 172, 376, 508, 524, 584, 610, 674, 816, 874, 1032, 1388, 1708, 1952, 1980, 2072, 2138, 2294, 2368, 2602, 2832, 2994, or 3104, or relative to the reference sequence corresponding to SEQ ID NO: 4, 172, 376, 508, 524, 584, 610, 674, 816, 874, 1032, 1388, 1708, 1952, 1980, 2072, 2138, 2294, 2368, 2602, 2832, 2994, or 3104.

[0024] In some embodiments, the engineered adenylate kinase comprises an amino acid sequence having at least 70%, 75%, 80%, 81%, 82%, 83%, 84%, 85%, 86%, 87%, 88%, 89%, 90%, 91%, 92%, 93%, 94%, 95%, 96%, 97%, 98%, 99%, or more sequence identity to the reference sequence corresponding to residues 12-231 of SEQ ID NO: 4, or to the reference sequence corresponding to SEQ ID NO: 4, wherein the amino acid sequence comprises one or more substitutions relative to the reference sequence corresponding to residues 12-231 of SEQ ID NO: 4, or relative to the reference sequence corresponding to SEQ ID NO: 4.

[0025] In some embodiments, the engineered adenylate kinase comprises an amino acid sequence having at least 70%, 75%, 80%, 81%, 82%, 83%, 84%, 85%, 86%, 87%, 88%, 89%, 90%, 91%, 92%, 93%, 94%, 95%, 96%, 97%, 98%, 99%, or more sequence identity to the reference sequence corresponding to residues 12-231 of an even-numbered SEQ ID NO. of SEQ ID NOs: 86-372, or to the reference sequence corresponding to an even-numbered SEQ ID NO. of SEQ ID NOs: 86-372, wherein the amino acid sequence comprises one or more substitutions relative to the reference sequence corresponding to residues 12-231 of SEQ ID NO: 4, or relative to the reference sequence corresponding to SEQ ID NO: 4.

[0026] In some embodiments, the amino acid sequence of the engineered adenylate kinase comprises at least a substitution or substitution set at amino acid position(s) 100/101, 94, 179, 198, 57, 78, 68, 93, 77, 62, 14, 51, 118, 91, 163, 65, 173, 224, 66, 109, 60, 40/88, 191, 63, 68/170, 100, 108, 58, 180, 178, 199, 40, 80/203, 40/43, 39, 55, 110, 51/59, 155/226, 80, 219, 166, 202, 59, 38, 90, 80/184/203, 35, 222, 54, 111/153/155, 112, 175, 74, 105, 170, 117, 128, 61, 119, 155, 79, 220, 226, 108/155, 108/111, 111, 69/88, 43, 43/69/138, 40/43/88/134/178, 214, 80/82/184/219, 88/136, 16/40/43/88, 40/134, 88, 111/155, 223, 115, 190, 201, 126, 56, 216, 76, 69, 120, 116, 203, 194, or 138, wherein the amino acid sequence comprises one or more substitutions relative to the reference sequence corresponding to residues 12-231 of SEQ ID NO: 4, or relative to the reference sequence corresponding to SEQ ID NO: 4.

[0027] In some embodiments, the engineered adenylate kinase comprises an amino acid sequence having at least 70%, 75%, 80%, 81%, 82%, 83%, 84%, 85%, 86%, 87%, 88%, 89%, 90%, 91%, 92%, 93%, 94%, 95%, 96%, 97%, 98%, 99%, or more sequence identity to the reference sequence corresponding to residues 12-231 of SEQ ID NO: 172, or to the reference sequence corresponding to SEQ ID NO: 172, wherein the amino acid sequence comprises one or more substitutions relative to the reference sequence corresponding to residues 12-231 of SEQ ID NO: 172, or relative to the reference sequence corresponding to SEQ ID NO: 172.

[0028] In some embodiments, the engineered adenylate kinase comprises an amino acid sequence having at least 70%, 75%, 80%, 81%, 82%, 83%, 84%, 85%, 86%, 87%, 88%, 89%, 90%, 91%, 92%, 93%, 94%, 95%, 96%, 97%, 98%, 99%, or more sequence identity to the reference sequence corresponding to residues 12-231 of an even-numbered SEQ ID NO. of SEQ ID NOs: 374-444, or to the reference sequence corresponding to an even-numbered SEQ ID NO. of SEQ ID NOs: 374-444, wherein the amino acid sequence comprises one or more substitutions relative to the reference sequence corresponding to residues 12-231 of SEQ ID NO: 172, or relative to the reference sequence corresponding to SEQ ID NO: 172.

[0029] In some embodiments, the amino acid sequence of the engineered adenylate kinase comprises at least a substitution or substitution set at amino acid position(s) 66/78, 78/80/224, 78, 65/66, 78/224, 78/80/109, 40/60/94/226, 66/68, 78/80, 94/117/118/226, 68/109, 68, 94/179, 51/66/68/224, 94/117, 51/66/68/78/224, 66, 118, 93/94/180, 109, 68/224, 40/62/93, 93, 51/66, 94/117/118, 198/220, 93/117, 117/118, 93/198, 68/173, 40/117, 224, 40/118/226, 93/94, or 40/62/118, wherein the amino acid sequence comprises one or more substitutions relative to the reference sequence corresponding to residues 12-231 of SEQ ID NO: 172, or relative to the reference sequence corresponding to SEQ ID NO: 172.

[0030] In some embodiments, the engineered adenylate kinase comprises an amino acid sequence having at least 70%, 75%, 80%, 81%, 82%, 83%, 84%, 85%, 86%, 87%, 88%, 89%, 90%, 91%, 92%, 93%, 94%, 95%, 96%, 97%, 98%, 99%, or more sequence identity to the reference sequence corresponding to residues 12-231 of SEQ ID NO: 376, or to the reference sequence corresponding to SEQ ID NO: 376, wherein the amino acid sequence comprises one or more substitutions relative to the reference sequence corresponding to residues 12-231 of SEQ ID NO: 376, or relative to the reference sequence corresponding to SEQ ID NO: 376.

[0031] In some embodiments, the engineered adenylate kinase comprises an amino acid sequence having at least 70%, 75%, 80%, 81%, 82%, 83%, 84%, 85%, 86%, 87%, 88%, 89%, 90%, 91%, 92%, 93%, 94%, 95%, 96%, 97%, 98%, 99%, or more sequence identity to the reference sequence corresponding to residues 12-231 of an even-numbered SEQ ID NO. of SEQ ID NOs: 446-510, or to the reference sequence corresponding to an even-numbered SEQ ID NO. of SEQ ID NOs: 446-510, wherein the amino acid sequence comprises one or more substitutions relative to the reference sequence corresponding to residues 12-231 of SEQ ID NO: 376, or relative to the reference sequence corresponding to SEQ ID NO: 376.

[0032] In some embodiments, the amino acid sequence of the engineered adenylate kinase comprises at least a substitution or substitution set at amino acid position(s) 13, 60, 126, 104, 201, 59, 55, 133, 61, 53, 190, 57, 62, 181, 168, 54, 173, 170, 34, 183, 14, 60/62/124/170, 60/170, or 60/62, wherein the amino acid positions are relative to the reference sequence corresponding to residues 12-231 of SEQ ID NO: 376, or relative to the reference sequence corresponding to SEQ ID NO: 376.

[0033] In some embodiments, the engineered adenylate kinase comprises an amino acid sequence having at least 70%, 75%, 80%, 81%, 82%, 83%, 84%, 85%, 86%, 87%, 88%, 89%, 90%, 91%, 92%, 93%, 94%, 95%, 96%, 97%, 98%, 99%, or more sequence identity to the reference sequence corresponding to residues 12-231 of SEQ ID NO: 508, or to the reference sequence corresponding to SEQ ID NO: 508, wherein the amino acid sequence comprises one or more substitutions relative to the reference sequence corresponding to residues 12-231 of SEQ ID NO: 508, or relative to the reference sequence corresponding to SEQ ID NO: 508.

[0034] In some embodiments, the engineered adenylate kinase comprises an amino acid sequence having at least 70%, 75%, 80%, 81%, 82%, 83%, 84%, 85%, 86%, 87%, 88%, 89%, 90%, 91%, 92%, 93%, 94%, 95%, 96%, 97%, 98%, 99%, or more sequence identity to the reference sequence corresponding to residues 12-231 of an even-numbered SEQ ID NO. of SEQ ID NOs: 512-580, or to the reference sequence corresponding to an even-numbered SEQ ID NO. of SEQ ID NOs: 512-580, wherein the amino acid sequence comprises one or more substitutions relative to the reference sequence corresponding to residues 12-231 of SEQ ID NO: 508, or relative to the reference sequence corresponding to SEQ ID NO: 508.

[0035] In some embodiments, the amino acid sequence of the engineered adenylate kinase comprises at least a substitution or substitution set at amino acid position(s) 15, 15/68, 15/181, 13/15, 13/15/201, 54/55, 55/133, 55/133/197, 54/55/133/197, 68, 54/133/197, 54/197, 13/15/68, 34, 54, 133, 120, 34/133, 13/15/181, 55, 15/59, 68/181, 201, 181, 66, 15/59/181, 197, 13/15/59, 61, 34/61, 13, 34/69, or 163, wherein the amino acid positions are relative to the reference sequence corresponding to residues 12-231 of SEQ ID NO: 508, or relative to the reference sequence corresponding to SEQ ID NO: 508.

[0036] In some embodiments, the engineered adenylate kinase comprises an amino acid sequence having at least 70%, 75%, 80%, 81%, 82%, 83%, 84%, 85%, 86%, 87%, 88%, 89%, 90%, 91%, 92%, 93%, 94%, 95%, 96%, 97%, 98%, 99%, or more sequence identity to the reference sequence corresponding to residues 12-231 of SEQ ID NO: 524, or to the reference sequence corresponding to SEQ ID NO: 524, wherein the amino acid sequence comprises one or more substitutions relative to the reference sequence corresponding to residues 12-231 of SEQ ID NO: 524, or relative to the reference sequence corresponding to SEQ ID NO: 524.

[0037] In some embodiments, the engineered adenylate kinase comprises an amino acid sequence having at least 70%, 75%, 80%, 81%, 82%, 83%, 84%, 85%, 86%, 87%, 88%, 89%, 90%, 91%, 92%, 93%, 94%, 95%, 96%, 97%, 98%, 99%, or more sequence identity to the reference sequence corresponding to residues 12-231 of an even-numbered SEQ ID NO. of SEQ ID NOs: 582-608, or to the reference sequence corresponding to an even-numbered SEQ ID NO. of SEQ ID NOs: 582-608, wherein the amino acid sequence comprises one or more substitutions relative to the reference sequence corresponding to residues 12-231 of SEQ ID NO: 524, or relative to the reference sequence corresponding to SEQ ID NO: 524.

[0038] In some embodiments, the amino acid sequence of the engineered adenylate kinase comprises at least a substitution or substitution set at amino acid position(s) 120, 61/201, 34, 36, 105, 112, 31, or 146, wherein the amino acid positions are relative to the reference sequence corresponding to residues 12-231 of SEQ ID NO: 524, or relative to the reference sequence corresponding to SEQ ID NO: 524.

[0039] In some embodiments, the engineered adenylate kinase comprises an amino acid sequence having at least 70%, 75%, 80%, 81%, 82%, 83%, 84%, 85%, 86%, 87%, 88%, 89%, 90%, 91%, 92%, 93%, 94%, 95%, 96%, 97%, 98%, 99%, or more sequence identity to the reference sequence corresponding to residues 12-231 of SEQ ID NO: 584, or to the reference sequence corresponding to SEQ ID NO: 584, wherein the amino acid sequence comprises one or more substitutions relative to the reference sequence corresponding to residues 12-231 of SEQ ID NO: 584, or relative to the reference sequence corresponding to SEQ ID NO: 584.

[0040] In some embodiments, the engineered adenylate kinase comprises an amino acid sequence having at least 70%, 75%, 80%, 81%, 82%, 83%, 84%, 85%, 86%, 87%, 88%, 89%, 90%, 91%, 92%, 93%, 94%, 95%, 96%, 97%, 98%, 99%, or more sequence identity to the reference sequence corresponding to residues 12-231 of an even-numbered SEQ ID NO. of SEQ ID NOs: 610-666, or to the reference sequence corresponding to an even-numbered SEQ ID NO. of SEQ ID NOs: 610-666, wherein the amino acid sequence comprises one or more substitutions relative to the reference sequence corresponding to residues 12-231 of SEQ ID NO: 584, or relative to the reference sequence corresponding to SEQ ID NO: 584.

[0041] In some embodiments, the amino acid sequence of the engineered adenylate kinase comprises at least a substitution or substitution set at amino acid position(s) 13/30/31/53/109/119/168, 36/126/190, 126, 36/39/126, 126/190, 36/126, 36/190, 39/126, 13/109/119, 109, 36/120/190, 126/148, 190, 108/126, 30/31, 13/118/182, 31/53, 39, 119, 13/119/168, 53/168, 34, 34/65/146, 36/39, 119/168, 34/112, or 173, wherein the amino acid positions are relative to the reference sequence corresponding to residues 12-231 of SEQ ID NO: 584, or relative to the reference sequence corresponding to SEQ ID NO: 584.

[0042] In some embodiments, the engineered adenylate kinase comprises an amino acid sequence having at least 70%, 75%, 80%, 81%, 82%, 83%, 84%, 85%, 86%, 87%, 88%, 89%, 90%, 91%, 92%, 93%, 94%, 95%, 96%, 97%, 98%, 99%, or more sequence identity to the reference sequence corresponding to residues 12-231 of SEQ ID NO: 610, or to the reference sequence corresponding to SEQ ID NO: 610, wherein the amino acid sequence comprises one or more substitutions relative to the reference sequence corresponding to residues 12-231 of SEQ ID NO: 610, or relative to the reference sequence corresponding to SEQ ID NO: 610.

[0043] In some embodiments, the engineered adenylate kinase comprises an amino acid sequence having at least 70%, 75%, 80%, 81%, 82%, 83%, 84%, 85%, 86%, 87%, 88%, 89%, 90%, 91%, 92%, 93%, 94%, 95%, 96%, 97%, 98%, 99%, or more sequence identity to the reference sequence corresponding to residues 12-231 of an even-numbered SEQ ID NO. of SEQ ID NOs: 668-780, or to the reference sequence corresponding to an even-numbered SEQ ID NO. of SEQ ID NOs: 668-780, wherein the amino acid sequence comprises one or more substitutions relative to the reference sequence corresponding to residues 12-231 of SEQ ID NO: 610, or relative to the reference sequence corresponding to SEQ ID NO: 610.

[0044] In some embodiments, the amino acid sequence of the engineered adenylate kinase comprises at least a substitution or substitution set at amino acid position(s) 190, 115/126/190, 126/190, 34/35/105, 126, 59/126, 34/105/116/146, 48, 66, 59, 148, 82, 100, 27, 135, 77, 138, 52, 68, 139, 184, 81, 65, 153, 50, 181, 214, 172, 69, or 154, wherein the amino acid positions are relative to the reference sequence corresponding to residues 12-231 of SEQ ID NO: 610, or relative to the reference sequence corresponding to SEQ ID NO: 610.

[0045] In some embodiments, the engineered adenylate kinase comprises an amino acid sequence having at least 70%, 75%, 80%, 81%, 82%, 83%, 84%, 85%, 86%, 87%, 88%, 89%, 90%, 91%, 92%, 93%, 94%, 95%, 96%, 97%, 98%, 99%, or more sequence identity to the reference sequence corresponding to residues 12-231 of SEQ ID NO: 674, or to the reference sequence corresponding to SEQ ID NO: 674, wherein the amino acid sequence comprises one or more substitutions relative to the reference sequence corresponding to residues 12-231 of SEQ ID NO: 674, or relative to the reference sequence corresponding to SEQ ID NO: 674.

[0046] In some embodiments, the engineered adenylate kinase comprises an amino acid sequence having at least 70%, 75%, 80%, 81%, 82%, 83%, 84%, 85%, 86%, 87%, 88%, 89%, 90%, 91%, 92%, 93%, 94%, 95%, 96%, 97%, 98%, 99%, or more sequence identity to the reference sequence corresponding to residues 12-231 of an even-numbered SEQ ID NO. of SEQ ID NOs: 782-868, or to the reference sequence corresponding to an even-numbered SEQ ID NO. of SEQ ID NOs: 782-868, wherein the amino acid sequence comprises one or more substitutions relative to the reference sequence corresponding to residues 12-231 of SEQ ID NO: 674, or relative to the reference sequence corresponding to SEQ ID NO: 674.

[0047] In some embodiments, the amino acid sequence of the engineered adenylate kinase comprises at least a substitution or substitution set at amino acid position(s) 81/148/219, 68/148/219, 68/81/219, 148/219, 81/219, 136/138/139, 68/219, 66/68/219, 66/148/219, 66/68/148, 59, 59/135, 219, 59/139, 138, 126/148/219, 59/181, 81, 66/81/219, 126/219, 66/68/81/148/219, 181, 27/148, 135/136/139, 148, 59/135/138/181, 59/135/136/138/139, 59/135/136/138/181, 27, 27/126/148, 135/136/138, 68/81/126/148/219, 136, 68, 126/148, or 138/139, wherein the amino acid positions are relative to the reference sequence corresponding to residues 12-231 of SEQ ID NO: 674, or relative to the reference sequence corresponding to SEQ ID NO: 674.

[0048] In some embodiments, the engineered adenylate kinase comprises an amino acid sequence having at least 70%, 75%, 80%, 81%, 82%, 83%, 84%, 85%, 86%, 87%, 88%, 89%, 90%, 91%, 92%, 93%, 94%, 95%, 96%, 97%, 98%, 99%, or more sequence identity to the reference sequence corresponding to residues 12-231 of SEQ ID NO: 816, or to the reference sequence corresponding to SEQ ID NO: 816, wherein the amino acid sequence comprises one or more substitutions relative to the reference sequence corresponding to residues 12-231 of SEQ ID NO: 816, or relative to the reference sequence corresponding to SEQ ID NO: 816.

[0049] In some embodiments, the engineered adenylate kinase comprises an amino acid sequence having at least 70%, 75%, 80%, 81%, 82%, 83%, 84%, 85%, 86%, 87%, 88%, 89%, 90%, 91%, 92%, 93%, 94%, 95%, 96%, 97%, 98%, 99%, or more sequence identity to the reference sequence corresponding to residues 12-231 of an even-numbered SEQ ID NO. of SEQ ID NOs: 870-1014, or to the reference sequence corresponding to an even-numbered SEQ ID NO. of SEQ ID NOs: 870-1014, wherein the amino acid sequence comprises one or more substitutions relative to the reference sequence corresponding to residues 12-231 of SEQ ID NO: 816, or relative to the reference sequence corresponding to SEQ ID NO: 816.

[0050] In some embodiments, the amino acid sequence of the engineered adenylate kinase comprises at least a substitution or substitution set at amino acid position(s) 48/100/148, 48/66/148/219, 48/100, 48/100/135/136, 48/66/77/100/135/136/148, 48/100/136, 48/135/148, 48/148, 48/136/148, 48/135, 48/135/136, 66/100, 48/66/219, 48/135/219, 100/148, 48/136/219, 48/219, 48/135/148/219, 100/135/136, 100/136, 66/77/100/136/219, 100/135, 48/77/100/135/136, 100, 77/100/135, 48/66/100/135/136/148/219, 52/184, 66, 52/68, 136/148, 126/184, 148, 184, 52, 135/136/148, 126/138/184, 27/184, 27/126, 27/126/148, 27, 27/126/184, 66/100/135/219, 27/68, 52/68/81/126, 48/66/136/148, 66/136/148, 66/135, 66/136, 66/135/219, 136, 135/148/219, 68/126, 66/148/219, 27/68/126, 27/68/184, 126, 68/81/126, 77/135, 135/136, 77/136, 77/148, 82, 138/184, 77/135/136, 27/138, 81, 81/126, 27/126/138, 68, or 81/138, wherein the amino acid positions are relative to the reference sequence corresponding to residues 12-231 of SEQ ID NO: 816, or relative to the reference sequence corresponding to SEQ ID NO: 816.

[0051] In some embodiments, the engineered adenylate kinase comprises an amino acid sequence having at least 70%, 75%, 80%, 81%, 82%, 83%, 84%, 85%, 86%, 87%, 88%, 89%, 90%, 91%, 92%, 93%, 94%, 95%, 96%, 97%, 98%, 99%, or more sequence identity to the reference sequence corresponding to residues 12-231 of SEQ ID NO: 874, or to the reference sequence corresponding to SEQ ID NO: 874, wherein the amino acid sequence comprises one or more substitutions relative to the reference sequence corresponding to residues 12-231 of SEQ ID NO: 874, or relative to the reference sequence corresponding to SEQ ID NO: 874.

[0052] In some embodiments, the engineered adenylate kinase comprises an amino acid sequence having at least 70%, 75%, 80%, 81%, 82%, 83%, 84%, 85%, 86%, 87%, 88%, 89%, 90%, 91%, 92%, 93%, 94%, 95%, 96%, 97%, 98%, 99%, or more sequence identity to the reference sequence corresponding to residues 12-231 of an even-numbered SEQ ID NO. of SEQ ID NOs: 1016-1302, or to the reference sequence corresponding to an even-numbered SEQ ID NO. of SEQ ID NOs: 1016-1302, wherein the amino acid sequence comprises one or more substitutions relative to the reference sequence corresponding to residues 12-231 of SEQ ID NO: 874, or relative to the reference sequence corresponding to SEQ ID NO: 874.

[0053] In some embodiments, the amino acid sequence of the engineered adenylate kinase comprises at least a substitution or substitution set at amino acid position(s) 32/60/135/175/225, 32/81/127/128/135/175/225, 83/175/225, 135/175/225, 54/84/190, 55/190/212, 32/60/81/83/127/128/135/225, 175/225, 32/127/175, 84/190/212, 32/128/175, 81/175, 21/54, 54/55/212, 32/175/225, 128/175/225, 62/84/190, 81/135/225, 21/54/62/190/212, 60/81/83/175, 55/84/190, 32/81/83/135/225, 175, 62/212, 32/81/83, 32/81/225, 54/55/84/212, 55/190, 62/179, 54/84/179/212, 54/55/62/84, 81/135, 32/81/135, 179/190/212, 55/62, 100, 21/54/62/190, 190/212, 128/175, 21/62/190, 54/179/190, 54/190, 21/55/190, 21/54/62, 21/84, 21/55, 21/62, 21/179, 55/62/190/212, 54/62/84, 127/128/175/225, 54/62, 100/104, 54/55, 21/55/212, 62, 55/84, 55/62/212, 21/84/190, 225, 21/54/179/190, 83/135, 32/175, 21/54/78/190, 55/62/179/190/212, 21/54/190, 21/55/84/190, 62/84, 21/55/62, 21/62/84, 135, 32/60/81/127, 21/54/55/62/78, 54/84, 55/62/179/190, 54/55/62/84/179/190/212, 190, 83, 78, 54/62/190, 21/55/62/179/190, 32/60/127, 54/62/84/190/212, 21/62/179, 127/128/225, 32/225, 32/60/81, 81, 54, 21, 60/81/128/175, 84, 21/190/212, 60/128/225, 179, 21/55/62/190, 128, 60, 212, 55, 127, 32, 80, 220, 62/78/179, 55/62/84, 21/55/190/212, 32/127/128/225, 21/54/55/84/179, 21/190, 32/60/81/83/128/135, 127/128, or 21/55/179, wherein the amino acid positions are relative to the reference sequence corresponding to residues 12-231 of SEQ ID NO: 874, or relative to the reference sequence corresponding to SEQ ID NO: 874.

[0054] In some embodiments, the engineered adenylate kinase comprises an amino acid sequence having at least 70%, 75%, 80%, 81%, 82%, 83%, 84%, 85%, 86%, 87%, 88%, 89%, 90%, 91%, 92%, 93%, 94%, 95%, 96%, 97%, 98%, 99%, or more sequence identity to the reference sequence corresponding to residues 12-231 of SEQ ID NO: 1032, or to the reference sequence corresponding to SEQ ID NO: 1032, wherein the amino acid sequence comprises one or more substitutions relative to the reference sequence corresponding to residues 12-231 of SEQ ID NO: 1032, or relative to the reference sequence corresponding to SEQ ID NO: 1032.

[0055] In some embodiments, the engineered adenylate kinase comprises an amino acid sequence having at least 70%, 75%, 80%, 81%, 82%, 83%, 84%, 85%, 86%, 87%, 88%, 89%, 90%, 91%, 92%, 93%, 94%, 95%, 96%, 97%, 98%, 99%, or more sequence identity to the reference sequence corresponding to residues 12-231 of an even-numbered SEQ ID NO. of SEQ ID NOs: 1356-1552, or to the reference sequence corresponding to an even-numbered SEQ ID NO. of SEQ ID NOs: 1356-1552, wherein the amino acid sequence comprises one or more substitutions relative to the reference sequence corresponding to residues 12-231 of SEQ ID NO: 1032, or relative to the reference sequence corresponding to SEQ ID NO: 1032.

[0056] In some embodiments, the amino acid sequence of the engineered adenylate kinase comprises at least a substitution or substitution set at amino acid position(s) 54/80/225, 55/80/180, 54/55/80/208/225, 84/128/155/190/212, 62/155/190, 83/84/155/190, 62/128/135/190, 225, 84/155/190, 128/190, 190/212, 83/84/155, 54/208/225, 84/155/190, 84/212, 84/123/155/212, 62/128/190, 55/80/208/225, 155/190, 83/84/190/212, 83/128/155/190/212, 55/180/225, 84/190/212, 54/80/180/208/225, 80/208, 135/155/190, 212, 80/180/208, 128/135/190/212, 128/155/212, 80/208/225, 83/212, 62/84/155/190, 54/179/225, 84, 83/84/190, 128/212, 54/55/80/208, 55, 62/128, 54/80/208/225, 62/83/84/190, 179/225, 190, 80/169/208, 62/128/212, 80, 62, 54/55/80/225, 54/80/180/208, 83/84/128/190/212, 62/83/190, 62/190, 80/179, 80/180, 54/80, 62/83/84/128/190/212, 83/84/135/212, 54/80/179/208, 62/84/128, 11/62/84/128/190/212, 80/179/208, 80/225, 62/84/128/190/212, 62/84/212, 80/179/180/208/225, 62/135, 55/208, 62/84, 128/135/190, 55/208/225, 84/128/190, 62/84/128/190, 62/135/212, 54/179/180/225, 62/84/135/212, 135, 54/55/225, 55/80/179/180, 84/135/190, 84/128, 54, 84/128/135, 54/179/208/225, 55/179/225, 128, 62/83/84/155/190, 84/135, 84/128/155, 55/179/180, 83/84/128/190, or 54/55/179/225, wherein the amino acid positions are relative to the reference sequence corresponding to residues 12-231 of SEQ ID NO: 1032, or relative to the reference sequence corresponding to SEQ ID NO: 1032.

[0057] In some embodiments, the engineered adenylate kinase comprises an amino acid sequence having at least 70%, 75%, 80%, 81%, 82%, 83%, 84%, 85%, 86%, 87%, 88%, 89%, 90%, 91%, 92%, 93%, 94%, 95%, 96%, 97%, 98%, 99%, or more sequence identity to the reference sequence corresponding to residues 12-231 of SEQ ID NO: 1388, or to the reference sequence corresponding to SEQ ID NO: 1388, wherein the amino acid sequence comprises one or more substitutions relative to the reference sequence corresponding to residues 12-231 of SEQ ID NO: 1388, or relative to the reference sequence corresponding to SEQ ID NO: 1388.

[0058] In some embodiments, the engineered adenylate kinase comprises an amino acid sequence having at least 70%, 75%, 80%, 81%, 82%, 83%, 84%, 85%, 86%, 87%, 88%, 89%, 90%, 91%, 92%, 93%, 94%, 95%, 96%, 97%, 98%, 99%, or more sequence identity to the reference sequence corresponding to residues 12-231 of an even-numbered SEQ ID NO. of SEQ ID NOs: 1554-1786, or to the reference sequence corresponding to an even-numbered SEQ ID NO. of SEQ ID NOs: 1554-1786, wherein the amino acid sequence comprises one or more substitutions relative to the reference sequence corresponding to residues 12-231 of SEQ ID NO: 1388, or relative to the reference sequence corresponding to SEQ ID NO: 1388.

[0059] In some embodiments, the amino acid sequence of the engineered adenylate kinase comprises at least a substitution or substitution set at amino acid position(s) 143, 228, 136, 82, 156, 205, 226, 150, 219, 217, 218, 68, 142, 212, 213, 79, 230, 207, 155, 227, 129, 210, 133, 151, 43, 204, 182, 82/136/150/217, 136/150, 79/81/143/156/212/228, 82/136, 79/81/143/212, 79/133/228, 81/143/156/212, 136/219, 82/136/226, 136/150/217, 133/156, 133/143/228, 150/217, 82/136/150, 81, 81/143, 81/133/228, 143/228, 212/228, 79/81, 133/228, 133/212, 136/217, 216, 215, or 127, wherein the amino acid positions are relative to the reference sequence corresponding to residues 12-231 of SEQ ID NO: 1388, or relative to the reference sequence corresponding to SEQ ID NO: 1388.

[0060] In some embodiments, the engineered adenylate kinase comprises an amino acid sequence having at least 70%, 75%, 80%, 81%, 82%, 83%, 84%, 85%, 86%, 87%, 88%, 89%, 90%, 91%, 92%, 93%, 94%, 95%, 96%, 97%, 98%, 99%, or more sequence identity to the reference sequence corresponding to residues 12-231 of SEQ ID NO: 1708, or to the reference sequence corresponding to SEQ ID NO: 1708, wherein the amino acid sequence comprises one or more substitutions relative to the reference sequence corresponding to residues 12-231 of SEQ ID NO: 1708, or relative to the reference sequence corresponding to SEQ ID NO: 1708.

[0061] In some embodiments, the engineered adenylate kinase comprises an amino acid sequence having at least 70%, 75%, 80%, 81%, 82%, 83%, 84%, 85%, 86%, 87%, 88%, 89%, 90%, 91%, 92%, 93%, 94%, 95%, 96%, 97%, 98%, 99%, or more sequence identity to the reference sequence corresponding to residues 12-231 of an even-numbered SEQ ID NO. of SEQ ID NOs: 1788-1968, or to the reference sequence corresponding to an even-numbered SEQ ID NO. of SEQ ID NOs: 1788-1968, wherein the amino acid sequence comprises one or more substitutions relative to the reference sequence corresponding to residues 12-231 of SEQ ID NO: 1708, or relative to the reference sequence corresponding to SEQ ID NO: 1708.

[0062] In some embodiments, the amino acid sequence of the engineered adenylate kinase comprises at least a substitution or substitution set at amino acid position(s) 127, 143/155/219/228, 219, 127/142, 142/151/207/218, 143/213, 151/218, 127/142/218, 142/151, 143/155/205/213/228, 127/142/207, 127/216/218, 142/151/207, 143/219, 127/207, 127/218, 143/219/228, 127/216, 68/127/207, 143/155/212/228, 151, 143/213/228, 143/155/205, 151/207/216, 143/228, 68/127/207/218, 143/155, 143, 205/213/219, 155/212/219/228, 205/219/228, 143/205, 142/207, 143/205/219, 143/212/213, 127/207/218, 142, 127/142/151/207/218, 143/205/219/228, 205/213/228, 68/151/207, 68/127/142/207, 68/127, 218, 127/142/196, 142/207/218, 68/142/216, 68/127/216/218, 68/127/218, 151/216/218, 143/212/228, 127/142/151, 151/207, 127/142/216, 129/207/218, 68/142/151/207, 68/142/151, 151/207/218, 228, 155/213, 127/142/151/218, 127/151, 155/228, 68/142/207, 80/151/207, 205/228, 68/142/207/216/218, 68/218, 68/207, 216/218, 68/142, 212, 205, or 142/207/216/218, wherein the amino acid positions are relative to the reference sequence corresponding to residues 12-231 of SEQ ID NO: 1708, or relative to the reference sequence corresponding to SEQ ID NO: 1708.

[0063] In some embodiments, the engineered adenylate kinase comprises an amino acid sequence having at least 70%, 75%, 80%, 81%, 82%, 83%, 84%, 85%, 86%, 87%, 88%, 89%, 90%, 91%, 92%, 93%, 94%, 95%, 96%, 97%, 98%, 99%, or more sequence identity to the reference sequence corresponding to residues 12-231 of SEQ ID NO: 1952, or to the reference sequence corresponding to SEQ ID NO: 1952, wherein the amino acid sequence comprises one or more substitutions relative to the reference sequence corresponding to residues 12-231 of SEQ ID NO: 1952, or relative to the reference sequence corresponding to SEQ ID NO: 1952.

[0064] In some embodiments, the engineered adenylate kinase comprises an amino acid sequence having at least 70%, 75%, 80%, 81%, 82%, 83%, 84%, 85%, 86%, 87%, 88%, 89%, 90%, 91%, 92%, 93%, 94%, 95%, 96%, 97%, 98%, 99%, or more sequence identity to the reference sequence corresponding to residues 12-231 of an even-numbered SEQ ID NO. of SEQ ID NOs: 1970-2032, or to the reference sequence corresponding to an even-numbered SEQ ID NO. of SEQ ID NOs: 1970-2032, wherein the amino acid sequence comprises one or more substitutions relative to the reference sequence corresponding to residues 12-231 of SEQ ID NO: 1952, or relative to the reference sequence corresponding to SEQ ID NO: 1952.

[0065] In some embodiments, the amino acid sequence of the engineered adenylate kinase comprises at least a substitution or substitution set at amino acid position(s) 18/118, 87/119/192, 119/173/192, 118, 87/119, 18/118/170, 18, 119, 192, 87, 89, 59, 170, 64, 112, 93, 184, 146, 51, 125, 192, 191, 117, 172, or 163, wherein the amino acid positions are relative to the reference sequence corresponding to residues 12-231 of SEQ ID NO: 1952, or relative to the reference sequence corresponding to SEQ ID NO: 1952.

[0066] In some embodiments, the engineered adenylate kinase comprises an amino acid sequence having at least 70%, 75%, 80%, 81%, 82%, 83%, 84%, 85%, 86%, 87%, 88%, 89%, 90%, 91%, 92%, 93%, 94%, 95%, 96%, 97%, 98%, 99%, or more sequence identity to the reference sequence corresponding to residues 12-231 of SEQ ID NO: 1980, or to the reference sequence corresponding to SEQ ID NO: 1980, wherein the amino acid sequence comprises one or more substitutions relative to the reference sequence corresponding to residues 12-231 of SEQ ID NO: 1980, or relative to the reference sequence corresponding to SEQ ID NO: 1980.

[0067] In some embodiments, the engineered adenylate kinase comprises an amino acid sequence having at least 70%, 75%, 80%, 81%, 82%, 83%, 84%, 85%, 86%, 87%, 88%, 89%, 90%, 91%, 92%, 93%, 94%, 95%, 96%, 97%, 98%, 99%, or more sequence identity to the reference sequence corresponding to residues 12-231 of an even-numbered SEQ ID NO. of SEQ ID NOs: 2034-2134, or to the reference sequence corresponding to an even-numbered SEQ ID NO. of SEQ ID NOs: 2034-2134, wherein the amino acid sequence comprises one or more substitutions relative to the reference sequence corresponding to residues 12-231 of SEQ ID NO: 1980, or relative to the reference sequence corresponding to SEQ ID NO: 1980.

[0068] In some embodiments, the amino acid sequence of the engineered adenylate kinase comprises at least a substitution or substitution set at amino acid position(s) 87/119/192, 87/192, 87/119, 119/192, 192, 119, 146/192, 87, 59/87, 59/87/112/146, 146, 87/112/119, 74, 75, 66, 181, 81, 73, 77, 188, 216, 82, 136, 214, 21, 217, 154, 133, 71, 212, or 228, wherein the amino acid positions are relative to the reference sequence corresponding to residues 12-231 of SEQ ID NO: 1980, or relative to the reference sequence corresponding to SEQ ID NO: 1980.

[0069] In some embodiments, the engineered adenylate kinase comprises an amino acid sequence having at least 70%, 75%, 80%, 81%, 82%, 83%, 84%, 85%, 86%, 87%, 88%, 89%, 90%, 91%, 92%, 93%, 94%, 95%, 96%, 97%, 98%, 99%, or more sequence identity to the reference sequence corresponding to residues 12-231 of SEQ ID NO: 2072, or to the reference sequence corresponding to SEQ ID NO: 2072, wherein the amino acid sequence comprises one or more substitutions relative to the reference sequence corresponding to residues 12-231 of SEQ ID NO: 2072, or relative to the reference sequence corresponding to SEQ ID NO: 2072.

[0070] In some embodiments, the engineered adenylate kinase comprises an amino acid sequence having at least 70%, 75%, 80%, 81%, 82%, 83%, 84%, 85%, 86%, 87%, 88%, 89%, 90%, 91%, 92%, 93%, 94%, 95%, 96%, 97%, 98%, 99%, or more sequence identity to the reference sequence corresponding to residues 12-231 of an even-numbered SEQ ID NO. of SEQ ID NOs: 2136-2264, or to the reference sequence corresponding to an even-numbered SEQ ID NO. of SEQ ID NOs: 2136-2264, wherein the amino acid sequence comprises one or more substitutions relative to the reference sequence corresponding to residues 12-231 of SEQ ID NO: 2072, or relative to the reference sequence corresponding to SEQ ID NO: 2072.

[0071] In some embodiments, the amino acid sequence of the engineered adenylate kinase comprises at least a substitution or substitution set at amino acid position(s) 87, 194, 197, 93, 202, 38, 91, 183, 39, 146, 203, 37, 92, 36, 89, 131, 132, 90, 148, 35/197, 231, or 56, wherein the amino acid positions are relative to the reference sequence corresponding to residues 12-231 of SEQ ID NO: 2072, or relative to the reference sequence corresponding to SEQ ID NO: 2072.

[0072] In some embodiments, the engineered adenylate kinase comprises an amino acid sequence having at least 70%, 75%, 80%, 81%, 82%, 83%, 84%, 85%, 86%, 87%, 88%, 89%, 90%, 91%, 92%, 93%, 94%, 95%, 96%, 97%, 98%, 99%, or more sequence identity to the reference sequence corresponding to residues 12-231 of SEQ ID NO: 2138, or to the reference sequence corresponding to SEQ ID NO: 2138, wherein the amino acid sequence comprises one or more substitutions relative to the reference sequence corresponding to residues 12-231 of SEQ ID NO: 2138, or relative to the reference sequence corresponding to SEQ ID NO: 2138.

[0073] In some embodiments, the engineered adenylate kinase comprises an amino acid sequence having at least 70%, 75%, 80%, 81%, 82%, 83%, 84%, 85%, 86%, 87%, 88%, 89%, 90%, 91%, 92%, 93%, 94%, 95%, 96%, 97%, 98%, 99%, or more sequence identity to the reference sequence corresponding to residues 12-231 of an even-numbered SEQ ID NO. of SEQ ID NOs: 2266-2366, or to the reference sequence corresponding to an even-numbered SEQ ID NO. of SEQ ID NOs: 2266-2366, wherein the amino acid sequence comprises one or more substitutions relative to the reference sequence corresponding to residues 12-231 of SEQ ID NO: 2138, or relative to the reference sequence corresponding to SEQ ID NO: 2138.

[0074] In some embodiments, the amino acid sequence of the engineered adenylate kinase comprises at least a substitution or substitution set at amino acid position(s) 161, 162, 153, 216, 212, 156, 214, 229, 77/143/214/216, 143/156/216, 77/143, 77/143/216, 77/214/216, 77/216, 143/156, 156/216, 143, 77, 77/214, 77/143/161/162/212/214, 77/162/214/216, 77/143/156/214/216, 77/143/156/162/212/216, 77/143/156/161/214/216, 77/156/162/216, 156/161/214/216, 77/143/162/214/216, 143/216, 214/216, 143/156/214/216, 143/214/216, 77/143/212/216, 143/156/161/162/216, 156/162/214, 77/143/156/161/162, 143/161/214/216, 77/161/216, or 143/212/214/216, wherein the amino acid positions are relative to the reference sequence corresponding to residues 12-231 of SEQ ID NO: 2138, or relative to the reference sequence corresponding to SEQ ID NO: 2138.

[0075] In some embodiments, the engineered adenylate kinase comprises an amino acid sequence having at least 70%, 75%, 80%, 81%, 82%, 83%, 84%, 85%, 86%, 87%, 88%, 89%, 90%, 91%, 92%, 93%, 94%, 95%, 96%, 97%, 98%, 99%, or more sequence identity to the reference sequence corresponding to residues 12-231 of SEQ ID NO: 2294, or to the reference sequence corresponding to SEQ ID NO: 2294, wherein the amino acid sequence comprises one or more substitutions relative to the reference sequence corresponding to residues 12-231 of SEQ ID NO: 2294, or relative to the reference sequence corresponding to SEQ ID NO: 2294.

[0076] In some embodiments, the engineered adenylate kinase comprises an amino acid sequence having at least 70%, 75%, 80%, 81%, 82%, 83%, 84%, 85%, 86%, 87%, 88%, 89%, 90%, 91%, 92%, 93%, 94%, 95%, 96%, 97%, 98%, 99%, or more sequence identity to the reference sequence corresponding to residues 12-231 of an even-numbered SEQ ID NO. of SEQ ID NOs: 2368-2594, or to the reference sequence corresponding to an even-numbered SEQ ID NO. of SEQ ID NOs: 2368-2594, wherein the amino acid sequence comprises one or more substitutions relative to the reference sequence corresponding to residues 12-231 of SEQ ID NO: 2294, or relative to the reference sequence corresponding to SEQ ID NO: 2294.

[0077] In some embodiments, the amino acid sequence of the engineered adenylate kinase comprises at least a substitution or substitution set at amino acid position(s) 80, 105, 228, 50, 175, 170, 82, 173, 65, 53, 184, 122, 195, 68, 89, 34, 118, 119, 87, 179, 117, 113, 54, 190, 216, 88, 36, 166, 38, 169, 66, 142, 136, 131, 187, 40, 74, 127, 55, 148, 215, 64, 155, 116, 90, 132, 60, 94, 112, 120, 37, 108, 35, 51, 61, 212, 172, 59, or 56, wherein the amino acid positions are relative to the reference sequence corresponding to residues 12-231 of SEQ ID NO: 2294, or relative to the reference sequence corresponding to SEQ ID NO: 2294.

[0078] In some embodiments, the engineered adenylate kinase comprises an amino acid sequence having at least 70%, 75%, 80%, 81%, 82%, 83%, 84%, 85%, 86%, 87%, 88%, 89%, 90%, 91%, 92%, 93%, 94%, 95%, 96%, 97%, 98%, 99%, or more sequence identity to the reference sequence corresponding to residues 12-231 of SEQ ID NO: 2368, or to the reference sequence corresponding to SEQ ID NO: 2368, wherein the amino acid sequence comprises one or more substitutions relative to the reference sequence corresponding to residues 12-231 of SEQ ID NO: 2368, or relative to the reference sequence corresponding to SEQ ID NO: 2368.

[0079] In some embodiments, the engineered adenylate kinase comprises an amino acid sequence having at least 70%, 75%, 80%, 81%, 82%, 83%, 84%, 85%, 86%, 87%, 88%, 89%, 90%, 91%, 92%, 93%, 94%, 95%, 96%, 97%, 98%, 99%, or more sequence identity to the reference sequence corresponding to residues 12-231 of an even-numbered SEQ ID NO. of SEQ ID NOs: 2596-2652 or 2676-2714, or to the reference sequence corresponding to an even-numbered SEQ ID NO. of SEQ ID NOs: 2596-2652 or 2676-2714, wherein the amino acid sequence comprises one or more substitutions relative to the reference sequence corresponding to residues 12-231 of SEQ ID NO: 2368, or relative to the reference sequence corresponding to SEQ ID NO: 2368.

[0080] In some embodiments, the amino acid sequence of the engineered adenylate kinase comprises at least a substitution or substitution set at amino acid position(s) 20, 21, 22, 43, 44, 46, 48, 138, 181, 182, 136/228, 82/142/173/184/216, 184/216, 50/184/216, 127/173/184, 105/136/170/175/228, 105/175, 50/184, 105/170/175/228, 50/127/173/184, 50/142/184/216, 50/82/127/216, 50, 50/82/173/216, 50/127/142/184/216, 50/82/127, 105/136, 105/228, 105/136/175/228, 173/216, 50/173, 228, 127/173, 105/136/170/195, 50/82/216, 175/228, or 50/82/127/142/184/216, wherein the amino acid positions are relative to the reference sequence corresponding to residues 12-231 of SEQ ID NO: 2368, or relative to the reference sequence corresponding to SEQ ID NO: 2368.

[0081] In some embodiments, the engineered adenylate kinase comprises an amino acid sequence having at least 70%, 75%, 80%, 81%, 82%, 83%, 84%, 85%, 86%, 87%, 88%, 89%, 90%, 91%, 92%, 93%, 94%, 95%, 96%, 97%, 98%, 99%, or more sequence identity to the reference sequence corresponding to residues 12-231 of SEQ ID NO: 2602, or to the reference sequence corresponding to SEQ ID NO: 2602, wherein the amino acid sequence comprises one or more substitutions relative to the reference sequence corresponding to residues 12-231 of SEQ ID NO: 2602, or relative to the reference sequence corresponding to SEQ ID NO: 2602.

[0082] In some embodiments, the engineered adenylate kinase comprises an amino acid sequence having at least 70%, 75%, 80%, 81%, 82%, 83%, 84%, 85%, 86%, 87%, 88%, 89%, 90%, 91%, 92%, 93%, 94%, 95%, 96%, 97%, 98%, 99%, or more sequence identity to the reference sequence corresponding to residues 12-231 of an even-numbered SEQ ID NO. of SEQ ID NOs: 2716-2988, or to the reference sequence corresponding to an even-numbered SEQ ID NO. of SEQ ID NOs: 2716-2988, wherein the amino acid sequence comprises one or more substitutions relative to the reference sequence corresponding to residues 12-231 of SEQ ID NO: 2602, or relative to the reference sequence corresponding to SEQ ID NO: 2602.

[0083] In some embodiments, the amino acid sequence of the engineered adenylate kinase comprises at least a substitution or substitution set at amino acid position(s) 18, 18/56, 20, 21, 26, 27, 29, 30, 32, 42, 43, 50, 66, 67, 69, 70, 80, 98, 99, 102, 135, 137, 139, 141, 142, 143, 148, 149, 152, 153, 156, 173, 184, or 216, wherein the amino acid positions are relative to the reference sequence corresponding to residues 12-231 of SEQ ID NO: 2602, or relative to the reference sequence corresponding to SEQ ID NO: 2602.

[0084] In some embodiments, the amino acid sequence of the engineered adenylate kinase comprises at least a substitution or substitution set at amino acid position(s) 65, 65/104, 65/104/105/116/127, 65/104/105/127/136, 65/104/136, 65/104/136/170, 65/105/116/136/170, 65/105/127/136, 65/105/127/136/175, 65/105/127/170, 65/105/127/175, 65/105/136, 65/105/136/170, 65/105/170, 65/116, 65/127/136, 65/127/136/170, 65/127/170, 94/173, 94/187, 104/105, 104/105/127, 104/105/127/136/175/195, 104/105/136/170, 104/127, 104/127/136/170, 104/127/136/175, 105, 105/116/127/136/170/175, 105/127/136, 105/127/136/195, 105/136, 105/136/195, 116/127/136/175, 127/195, 132, 136, or 170, wherein the amino acid positions are relative to the reference sequence corresponding to residues 12-231 of SEQ ID NO: 2602, or relative to the reference sequence corresponding to SEQ ID NO: 2602.

[0085] In some embodiments, the amino acid sequence of the engineered adenylate kinase comprises at least a substitution at amino acid position 36, 37, 40, 50, 59, 89, 117, 120, 128, 168, or 203, or combinations thereof, wherein the amino acid positions are relative to the reference sequence corresponding to residues 12-231 of SEQ ID NO: 2602, or relative to the reference sequence corresponding to SEQ ID NO: 2602.

[0086] In some embodiments, the engineered adenylate kinase comprises an amino acid sequence having at least 70%, 75%, 80%, 81%, 82%, 83%, 84%, 85%, 86%, 87%, 88%, 89%, 90%, 91%, 92%, 93%, 94%, 95%, 96%, 97%, 98%, 99%, or more sequence identity to the reference sequence corresponding to residues 12-231 of SEQ ID NO: 2832, or to the reference sequence corresponding to SEQ ID NO: 2832, wherein the amino acid sequence comprises one or more substitutions relative to the reference sequence corresponding to residues 12-231 of SEQ ID NO: 2832, or relative to the reference sequence corresponding to SEQ ID NO: 2832.

[0087] In some embodiments, the engineered adenylate kinase comprises an amino acid sequence having at least 70%, 75%, 80%, 81%, 82%, 83%, 84%, 85%, 86%, 87%, 88%, 89%, 90%, 91%, 92%, 93%, 94%, 95%, 96%, 97%, 98%, 99%, or more sequence identity to the reference sequence corresponding to residues 12-231 of an even-numbered SEQ ID NO. of SEQ ID NOs: 2990-3032, or to the reference sequence corresponding to an even-numbered SEQ ID NO. of SEQ ID NOs: 2990-3032, wherein the amino acid sequence comprises one or more substitutions relative to the reference sequence corresponding to residues 12-231 of SEQ ID NO: 2832, or relative to the reference sequence corresponding to SEQ ID NO: 2832.

[0088] In some embodiments, the amino acid sequence of the engineered adenylate kinase comprises an amino acid sequence of the engineered adenylate kinase comprises at least a substitution or substitution set at amino acid position(s) 36, 36/50, 36/50/89/93/110, 36/50/89/93/139, 36/50/89/139/170, 36/50/89/172, 36/89, 36/170, 50, 50/89/93, 50/89/93/139, 50/93, 50/170, 89/170/172, 90/104, 90/151/157, 104/151/154, 104/151/154/157, 104/154/157/216, 151/157, 151/216, or 216, wherein the amino acid positions are relative to the reference sequence corresponding to residues 12-231 of SEQ ID NO: 2832, or relative to the reference sequence corresponding to SEQ ID NO: 2832.

[0089] In some embodiments, the engineered adenylate kinase comprises an amino acid sequence having at least 70%, 75%, 80%, 81%, 82%, 83%, 84%, 85%, 86%, 87%, 88%, 89%, 90%, 91%, 92%, 93%, 94%, 95%, 96%, 97%, 98%, 99%, or more sequence identity to the reference sequence corresponding to residues 12-231 of SEQ ID NO: 2994, or to the reference sequence corresponding to SEQ ID NO: 2994, wherein the amino acid sequence comprises one or more substitutions relative to the reference sequence corresponding to residues 12-231 of SEQ ID NO: 2994, or relative to the reference sequence corresponding to SEQ ID NO: 2994.

[0090] In some embodiments, the engineered adenylate kinase comprises an amino acid sequence having at least 70%, 75%, 80%, 81%, 82%, 83%, 84%, 85%, 86%, 87%, 88%, 89%, 90%, 91%, 92%, 93%, 94%, 95%, 96%, 97%, 98%, 99%, or more sequence identity to the reference sequence corresponding to residues 12-231 of an even-numbered SEQ ID NO. of SEQ ID NOs: 3034-3150, or to the reference sequence corresponding to an even-numbered SEQ ID NO. of SEQ ID NOs: 3034-3150, wherein the amino acid sequence comprises one or more substitutions relative to the reference sequence corresponding to residues 12-231 of SEQ ID NO: 2994, or relative to the reference sequence corresponding to SEQ ID NO: 2994.

[0091] In some embodiments, the amino acid sequence of the engineered adenylate kinase comprises an amino acid sequence of the engineered adenylate kinase comprises at least a substitution or substitution set at amino acid position(s) 50, 58, 59, 68, 74, 76, 79, 80, 83, 90, 112, 113, 119, 157, 170, 172, 182, 184, 217, 224, 226, 228, 229, 230, or 231, or combinations thereof, wherein the amino acid positions are relative to the reference sequence corresponding to residues 12-231 of SEQ ID NO: 2994, or relative to the reference sequence corresponding to SEQ ID NO: 2994.

[0092] In some embodiments, the amino acid sequence of the engineered adenylate kinase comprises an amino acid sequence of the engineered adenylate kinase comprises at least a substitution or substitution set at amino acid position(s) 79/104/157/228, 79/157/228/229, 79/157/229, 79/228, 83, 83/104, 83/104/151/168/173/190, 83/113, 83/173/190, 83/173/190/201, 83/173/201, 83/190, 83/190/201/216, 83/216, 104/157, 157, 157/173/190/216, 157/183, 157/190, 157/190/216, 157/228, 173/216, 201/216, or 229, wherein the amino acid positions are relative to the reference sequence corresponding to residues 12-231 of SEQ ID NO: 2994, or relative to the reference sequence corresponding to SEQ ID NO: 2994.

[0093] In some embodiments, the engineered adenylate kinase comprises an amino acid sequence having at least 70%, 75%, 80%, 81%, 82%, 83%, 84%, 85%, 86%, 87%, 88%, 89%, 90%, 91%, 92%, 93%, 94%, 95%, 96%, 97%, 98%, 99%, or more sequence identity to the reference sequence corresponding to residues 12-231 of SEQ ID NO: 3104, or to the reference sequence corresponding to SEQ ID NO: 3104, wherein the amino acid sequence comprises one or more substitutions relative to the reference sequence corresponding to residues 12-231 of SEQ ID NO: 3104, or relative to the reference sequence corresponding to SEQ ID NO: 3104.

[0094] In some embodiments, the engineered adenylate kinase comprises an amino acid sequence having at least 70%, 75%, 80%, 81%, 82%, 83%, 84%, 85%, 86%, 87%, 88%, 89%, 90%, 91%, 92%, 93%, 94%, 95%, 96%, 97%, 98%, 99%, or more sequence identity to the reference sequence corresponding to residues 12-231 of an even-numbered SEQ ID NO. of SEQ ID NOs: 3152-3192, or to the reference sequence corresponding to an even-numbered SEQ ID NO. of SEQ ID NOs: 3152-3192, wherein the amino acid sequence comprises one or more substitutions relative to the reference sequence corresponding to residues 12-231 of SEQ ID NO: 3104, or relative to the reference sequence corresponding to SEQ ID NO: 3104.

[0095] In some embodiments, the amino acid sequence of the engineered adenylate kinase comprises an amino acid sequence of the engineered adenylate kinase comprises at least a substitution or substitution set at amino acid position(s) 104, 104/157, 104/157/190/228, 104/170/228, 104/157/228/229, 104/157/229, 104/170/190, 104/170/190/228, 104/190, 104/190/201, 104/190/228, 104/201/228, 104/228/229, 157/228, 157/228/229, 170/190/228, 170/190/228/229, 190, 190/229, 201/228, or 228, wherein the amino acid positions are relative to the reference sequence corresponding to residues 12-231 of SEQ ID NO: 3104, or relative to the reference sequence corresponding to SEQ ID NO: 3104.

[0096] In some embodiments, the amino acid sequence of the engineered adenylate kinase comprises at least one substitution set forth in Tables 7.2, 8.2, 9.2, 10.2, 11.2, 12.1, 13.2, 14.1, 15.2, 16.2, 17.2, 18.2, 19.2, 20.2, 21.2, 23.2, 24.2, 25.2, 26.2, 27.2, 28.2, 29.2, 30.2, 31.2, 32.2, 33.2, 34.2, 35.2, 36.2, 37.2, 38.2, 40.2, 41.2, 42.2, 43.2, 44.2, 45.2, 46.2, 47.2, 48.2, and 49.2, wherein the amino acid positions are relative to the reference sequence corresponding to SEQ ID NO: 2, 4, 172, 376, 508, 524, 584, 610, 674, 816, 874, 1032, 1388, 1708, 1952, 1980, 2072, 2138, 2294, 2368, 2602, 2832, 2994, or 3104.

[0097] In some embodiments, the amino acid sequence of the engineered adenylate kinase comprises at least a substitution or substitution set of an engineered adenylate kinase variant set forth in Tables 7.2, 8.2, 9.2, 10.2, 11.2, 12.1, 13.2, 14.1, 15.2, 16.2, 17.2, 18.2, 19.2, 20.2, 21.2, 23.2, 24.2, 25.2, 26.2, 27.2, 28.2, 29.2, 30.2, 31.2, 32.2, 33.2, 34.2, 35.2, 36.2, 37.2, 38.2, 40.2, 41.2, 42.2, 43.2, 44.2, 45.2, 46.2, 47.2, 48.2, and 49.2, wherein the amino acid positions are relative to the reference sequence corresponding to SEQ ID NO: 2, 4, 172, 376, 508, 524, 584, 610, 674, 816, 874, 1032, 1388, 1708, 1952, 1980, 2072, 2138, 2294, 2368, 2602, 2832, 2994, or 3104.

[0098] In some embodiments, the engineered adenylate kinase comprises an amino acid sequence having at least 70%, 75%, 80%, 81%, 82%, 83%, 84%, 85%, 86%, 87%, 88%, 89%, 90%, 91%, 92%, 93%, 94%, 95%, 96%, 97%, 98%, 99% or more sequence identity to a reference amino acid sequence comprising a substitution or substitution set of an engineered adenylate kinase variant set forth in Tables 7.2, 8.2, 9.2, 10.2, 11.2, 12.1, 13.2, 14.1, 15.2, 16.2, 17.2, 18.2, 19.2, 20.2, 21.2, 23.2, 24.2, 25.2, 26.2, 27.2, 28.2, 29.2, 30.2, 31.2, 32.2, 33.2, 34.2, 35.2, 36.2, 37.2, 38.2, 40.2, 41.2, 42.2, 43.2, 44.2, 45.2, 46.2, 47.2, 48.2, and 49.2, wherein the amino acid positions are relative to the reference sequence corresponding to SEQ ID NO: 2, 4, 172, 376, 508, 524, 584, 610, 674, 816, 874, 1032, 1388, 1708, 1952, 1980, 2072, 2138, 2294, 2368, 2602, 2832, 2994, or 3104.

[0099] In some embodiments, the engineered adenylate kinase comprises an amino acid sequence comprising residues 12-231 of an even-numbered SEQ ID NO. of SEQ ID NOs: 4-1302, 1356-2652, and 2676-3192, or comprises an even-numbered SEQ ID NO. of SEQ ID NOs: 4-1302, 1356-2652, and 2676-3192, optionally wherein the engineered adenylate kinase has 1, 2, 3, 4, 5, 6, 7, 8, 9, or up to 10 substitutions in the amino acid sequence.

[0100] In some embodiments, the engineered adenylate kinase comprises an amino acid sequence comprising residues 12-231 of SEQ ID NO: 4, 172, 376, 508, 524, 584, 610, 674, 816, 874, 1032, 1388, 1708, 1952, 1980, 2072, 2138, 2294, 2368, 2602, 2832, 2994, or 3104, or wherein the amino acid sequence comprises SEQ ID NO: 4, 172, 376, 508, 524, 584, 610, 674, 816, 874, 1032, 1388, 1708, 1952, 1980, 2072, 2138, 2294, 2368, 2602, 2832, 2994, or 3104, optionally wherein the engineered adenylate kinase has 1, 2, 3, 4, 5, 6, 7, 8, 9, or up to 10 substitutions in the amino acid sequence.

[0101] In some embodiments, the engineered adenylate kinase has adenylate kinase activity and at least one improved property as compared to a reference adenylate kinase. In some embodiments, the engineered adenylate kinase has an improved property selected from i) increased activity on unmodified nucleoside monophosphate (NMP), ii) increased stability, iii) increased thermostability, iv) increased activity on 2′-fluoro modified nucleoside monophosphate, and v) increased activity on 2′-O-methyl modified nucleoside monophosphate, or any combinations of i), ii), iii), iv), and v) as compared to a reference adenylate kinase. In some embodiments, the reference adenylate kinase has an amino acid sequence corresponding to residues 12-231 of SEQ ID NO: 2, 4, 172, 376, 508, 524, 584, 610, 674, 816, 874, 1032, 1388, 1708, 1952, 1980, 2072, 2138, 2294, 2368, 2602, 2832, 2994, or 3104, or an amino acid sequence corresponding to SEQ ID NO: 2, 4, 172, 376, 508, 524, 584, 610, 674, 816, 874, 1032, 1388, 1708, 1952, 1980, 2072, 2138, 2294, 2368, 2602, 2832, 2994, or 3104. In some embodiments, the reference adenylate kinase has an amino acid sequence corresponding to residues 12-231 of SEQ ID NO: 2, or an amino acid sequence corresponding to SEQ ID NO: 2.

[0102] In some embodiments, the engineered adenylate kinase is purified. In some embodiments, the engineered adenylate kinase is immobilized on a support medium.

[0103] In a further aspect, the present disclosure provides a recombinant polynucleotide comprising a polynucleotide sequence encoding an engineered adenylate kinase described herein.

[0104] In some embodiments, the recombinant polynucleotide comprises a polynucleotide sequence having at least 70%, 75%, 80%, 81%, 82%, 83%, 84%, 85%, 86%, 87%, 88%, 89%, 90%, 91%, 92%, 93%, 94%, 95%, 96%, 97%, 98%, 99%, or more sequence identity to a reference polynucleotide sequence corresponding to nucleotide residues 34-693 of SEQ ID NO: 1, 3, 171, 375, 507, 523, 583, 609, 673, 815, 873, 1031, 1387, 1707, 1951, 1979, 2071, 2137, 2293, 2367, 2601, 2831, 2993, or3103, or to a reference polynucleotide sequence corresponding to SEQ ID NO: 1, 3, 171, 375, 507, 523, 583, 609, 673, 815, 873, 1031, 1387, 1707, 1951, 1979, 2071, 2137, 2293, 2367, 2601, 2831, 2993, or 3103, wherein the recombinant polynucleotide encodes an adenylate kinase.

[0105] In some embodiments, the recombinant polynucleotide comprises a polynucleotide sequence having at least 70%, 75%, 80%, 81%, 82%, 83%, 84%, 85%, 86%, 87%, 88%, 89%, 90%, 91%, 92%, 93%, 94%, 95%, 96%, 97%, 98%, 99%, or more sequence identity to a reference polynucleotide sequence corresponding to nucleotide residues 34-693 of an odd-numbered SEQ ID NO. of SEQ ID NOs: 3-1301, 1355-2651, and 2675-3191, or to a reference polynucleotide sequence corresponding to an odd-numbered SEQ ID NO. of SEQ ID NOs: 3-1301, 1355-2651, and 2675-3191, wherein the recombinant polynucleotide encodes an engineered adenylate kinase.

[0106] In some embodiments, the polynucleotide sequence encoding the engineered adenylate kinase has preferred codons, e.g., is codon optimized. In some embodiments, the polynucleotide sequence is codon optimized for expression in a bacterial cell, fungal cell, or a mammalian cell.

[0107] In some embodiments, the polynucleotide sequence comprises nucleotide residues 34-693 of an odd-numbered SEQ ID NO. of SEQ ID NOs: 3-1301, 1355-2651, and 2675-3191, or comprises an odd-numbered SEQ ID NO. of SEQ ID NOs: 3-1301, 1355-2651, and 2675-3191.

[0108] In some embodiments, the polynucleotide sequence comprises nucleotide residues 34-693 of SEQ ID NO: 1, 3, 171, 375, 507, 523, 583, 609, 673, 815, or 873, 1031, 1387, 1707, 1951, 1979, 2071, 2137, 2293, 2367, 2601, 2831, 2993, or 3103 or comprises SEQ ID NO: 1, 3, 171, 375, 507, 523, 583, 609, 673, 815, or 873, 1031, 1387, 1707, 1951, 1979, 2071, 2137, 2293, 2367, 2601, 2831, 2993, or 3103.

[0109] In another aspect, the present disclosure provides an expression vector comprising a recombinant polynucleotide encoding an engineered adenylate kinase described herein. In some embodiments, the recombinant polynucleotide of the expression vector is operably linked to a control sequence.

[0110] In a further aspect, the present disclosure also provides a host cell comprising an expression vector comprising a recombinant polynucleotide encoding an engineered adenylate kinase. In some embodiments, the host cell is a bacterial cell, fungal cell, insect cell, or mammalian cell.

[0111] In a further aspect, the host cells are used for producing an engineered adenylate kinase. In some embodiments, a method of producing an engineered adenylate kinase polypeptide comprises culturing a host cell comprising an expression vector described herein under suitable culture conditions such that the engineered adenylate kinase polypeptide is produced. In some embodiments, the method further comprises recovering or isolating the adenylate kinase polypeptide from the culture and/or host cells. In some embodiments, the method further comprises purifying the adenylate kinase polypeptide.

[0112] In a further aspect, the engineered adenylate kinase is provided as a composition. In some embodiments, the composition further comprises a nucleoside monophosphate substrate. In some embodiments, the nucleoside in the composition is a modified nucleoside monophosphate.

[0113] In a further aspect, the engineered adenylate kinase is used for converting a nucleoside monophosphate to the corresponding nucleoside diphosphate. In some embodiments, a method of converting a nucleoside monophosphate (NMP) to the nucleoside diphosphate (NDP), comprises contacting a nucleoside monophosphate with an engineered adenylate kinase described herein in the presence of substrate NTP under suitable reaction conditions to convert the nucleoside monophosphate to the corresponding nucleoside diphosphate.

[0114] In some embodiments of the method, the substrate nucleoside monophosphate is an unmodified nucleoside monophosphate. In some embodiments of the method, the substrate nucleoside monophosphate is a modified nucleoside monophosphate. In some embodiments, the modified nucleoside monophosphate comprises a modified sugar moiety, modified nucleobase, or modified phosphate, or any combination thereof.

### DETAILED DESCRIPTION

[0115] The present disclosure provides engineered adenylate kinases for the interconversion of ATP:AMP, and recombinant polynucleotides encoding the engineered adenylate kinases. In some embodiments, the engineered adenylate kinases has adenylate kinase activity, and one or more improved properties as compared to the parent wild-type enzyme, including increased activity on NDPs, including NDPs other than ADP, and increased activity on modified NDPs.

### Abbreviations and Definitions

[0116] In reference to the present invention, the technical and scientific terms used in the descriptions herein will have the meanings commonly understood by one of ordinary skill in the art, unless specifically defined otherwise. Accordingly, the following terms are intended to have the following meanings.

[0117] As used herein, the singular forms “a”, “an” and “the” include plural referents unless the context clearly indicates otherwise. Thus, for example, reference to “a polypeptide” includes more than one polypeptide.

[0118] Similarly, “comprise,” “comprises,” “comprising” “include,” “includes,” and “including” are interchangeable and not intended to be limiting. Thus, as used herein, the term “comprising” and its cognates are used in their inclusive sense (i.e., equivalent to the term “including” and its corresponding cognates).

[0119] It is to be further understood that where descriptions of various embodiments use the term “comprising,” those skilled in the art would understand that in some specific instances, an embodiment can be alternatively described using language “consisting essentially of” or “consisting of.”

[0120] “About” means an acceptable error for a particular value. In some instances, “about” means within 0.05%, 0.5%, 1.0%, or 2.0%, of a given value range. In some instances, “about” means within 1, 2, 3, or 4 standard deviations of a given value.

[0121] “EC” number refers to the Enzyme Nomenclature of the Nomenclature Committee of the International Union of Biochemistry and Molecular Biology (NC-IUBMB). The IUBMB biochemical classification is a numerical classification system for enzymes based on the chemical reactions they catalyze.

[0122] “ATCC” refers to the American Type Culture Collection whose biorepository collection includes genes and strains.

[0123] “NCBI” refers to National Center for Biological Information and the sequence databases provided therein.

[0124] “Adenylate kinase,” “AdyK,” or “AK” refers to an enzyme that catalyzes the interconversion of ATP, ADP, and AMP through transfer of phosphoryl groups. In some embodiments, adenylate kinase also includes enzymes capable of catalyzing the interconversion of NTP, NDP and NMP. In some embodiments, adenylate kinase are enzymes classified in EC 2.7.3.4.

[0125] “Creatine kinase” refers to an enzyme that catalyzes the reversible interconversion of creatine:ATP to creatine phosphate:ADP.

[0126] “Polyphosphate kinase” refers to an enzyme that catalyzes the transfer of phosphate group(s) from high-energy, phosphate-donating molecules, such as polyphosphate (PolyPn), to specific substrates/molecules. Two families of polyphosphate kinases, PPKK1 and PPK2, are known. PPK1s preferentially synthesize polyphosphate from NTP and the corresponding reverse reaction, and PPK2s preferentially consume polyphosphate to phosphorylate nucleoside mono- or diphosphates, and the corresponding reverse reactions. In some embodiments, polyphosphate kinase includes enzymes classified in EC 2.7.4.1.

[0127] “Acetate kinase (“AcK”) refers to enzymes that are capable of catalyzing the phosphorylation of nucleoside diphosphates or analogues thereof, to nucleoside triphosphates or the corresponding analogues, using acetyl phosphate or another phosphoryl group donor. Acetate kinases as used herein includes naturally occurring, wild-type enzymes or engineered enzymes. In some embodiments, acetate kinases are naturally occurring, wild-type basic metabolic enzymes found primarily in prokaryotes that catalyze the following reaction: acetate+ATP↔acetyl phosphate+ADP. Acetyl phosphate is an intermediate in the formation of acetyl-CoA. In some embodiments, acetate kinases are derived from the naturally occurring, wild-type enzymes.

[0128] “Adenosine kinase,” “AdoK,” or “Adk,” refer to an enzyme that catalyzes the phosphorylation of adenosine (A or ADO) to adenosine-5′-monophosphate (AMP). In some embodiments, adenosine kinase is classified in EC 2.7.1.20. Although the primary substrate is adenosine, adenosine kinases as used herein include enzymes that act on other nucleosides.

[0129] “Pyruvate oxidase” or “Pox” refers to an enzyme that catalyzes the catalyzes the reaction between pyruvate, inorganic phosphate, and oxygen to generate acetyl phosphate and H₂O₂. In some embodiments, pyruvate oxidase include enzymes classified in EC 1.2. 3.3.

[0130] “Catalase” refers to an enzyme that converts hydrogen peroxide (H₂O₂) to H₂O and O₂. Catalase can be used to remove residual hydrogen peroxide in applications where hydrogen peroxide is present or is a product in a process. In some embodiments, catalases includes enzymes classified in EC 1.11.1.6.

[0131] “Protein,” “polypeptide,” and “peptide” are used interchangeably herein to denote a polymer of at least two amino acids covalently linked by an amide bond, regardless of length or post-translational modification (e.g., glycosylation or phosphorylation). Included within this definition are D- and L-amino acids, and mixtures of D- and L-amino acids, as well as polymers comprising D- and L-amino acids, and mixtures of D- and L-amino acids.

[0132] “Fusion protein,” and “chimeric protein” and “chimera” refer to hybrid proteins created through the joining of two or more polynucleotides that originally encode separate proteins. In some embodiments, fusion proteins are created by recombinant technology (e.g., molecular biology techniques known in the art).

[0133] “Amino acids” are referred to herein by either their commonly known three-letter symbols or by the one-letter symbols recommended by IUPAC-IUB Biochemical Nomenclature Commission. Nucleotides, likewise, may be referred to by their commonly accepted single letter codes. The abbreviations used for the genetically encoded amino acids are conventional and are as follows: alanine (Ala or A), arginine (Arg or R), asparagine (Asn or N), aspartate (Asp or D), cysteine (Cys or C), glutamate (Glu or E), glycine (Gly or G), glutamine (Gln or Q), histidine (His or H), isoleucine (Ile or I), leucine (Leu or L), lysine (Lys or K), methionine (Met or M), phenylalanine (Phe or F), proline (Pro or P), serine (Ser or S), threonine (Thr or T), tryptophan (Trp or W), tyrosine (Tyr or Y), and valine (Val or V). When the three-letter abbreviations are used, unless specifically preceded by an “L” or a “D” or clear from the context in which the abbreviation is used, the amino acid may be in either the L- or D-configuration about α-carbon (Cα). For example, whereas “Ala” designates alanine without specifying the configuration about the α-carbon, “D-Ala” and “L-Ala” designate D-alanine and L-alanine, respectively. When the one-letter abbreviations are used, upper case letters designate amino acids in the L-configuration about the α-carbon and lower case letters designate amino acids in the D-configuration about the α-carbon. For example, “A” designates L-alanine and “a” designates D-alanine. When polypeptide sequences are presented as a string of one-letter or three-letter abbreviations (or mixtures thereof), the sequences are presented in the amino (N) to carboxy (C) direction in accordance with common convention.

[0134] “Polynucleotide” and “nucleic acid’ refer to two or more nucleotides that are covalently linked together. The polynucleotide may be wholly comprised of ribonucleotides (i.e., RNA), wholly comprised of 2′ deoxyribonucleotides (i.e., DNA), or comprised of mixtures of ribo- and 2′ deoxyribonucleotides. While the nucleosides will typically be linked together via standard phosphodiester linkages, the polynucleotides may include one or more non-standard linkages. The polynucleotide may be single-stranded or double-stranded, or may include both single-stranded regions and double-stranded regions. Moreover, while a polynucleotide will typically be composed of the naturally occurring encoding nucleobases (i.e., adenine, guanine, uracil, thymine and cytosine), it may include one or more modified and/or synthetic nucleobases, such as, for example, inosine, xanthine, hypoxanthine, etc. In some embodiments, such modified or synthetic nucleobases are nucleobases encoding amino acid sequences.

[0135] The abbreviations used for the genetically encoding nucleosides are conventional and are as follows: adenosine (A); guanosine (G); cytidine (C); thymidine (T); and uridine (U). Unless specifically delineated, the abbreviated nucleosides may be either ribonucleosides or 2′-deoxyribonucleosides. The nucleosides may be specified as being either ribonucleosides or 2′-deoxyribonucleosides on an individual basis or on an aggregate basis. When nucleic acid sequences are presented as a string of one-letter abbreviations, the sequences are presented in the 5′ to 3′ direction in accordance with common convention, and the phosphates are not indicated.

[0136] “Nucleobase” or “base” refers to those naturally occurring and synthetic heterocyclic moieties commonly known to those who utilize nucleic acid or polynucleotide technology to thereby generate polymers that can hybridize to polynucleotides in a sequence-specific manner. Non-limiting examples of nucleobases include, among others, adenine, cytosine, guanine, thymine, uracil, 5-propynyl-uracil, 2-thio-5-propynyl-uracil, 5-methylcytosine, pseudoisocytosine, pseudoisouridine, 2-thiouracil and 2-thiothymine, 2-aminopurine, N9-(2-amino-6-chloropurine), N9-(2,6-diaminopurine), hypoxanthine, N9-(7-deaza-guanine), N9-(7-deaza-8-aza-guanine) and N8-(7-deaza-8-aza-adenine).

[0137] “Nucleoside” refers to glycosylamines comprising a nucleobase, and a 5-carbon sugar (e.g., ribose, deoxyribose, or arabinose). Non-limiting examples of nucleosides include cytidine, uridine, adenosine, guanosine, thymidine, and inosine. In contrast, the term “nucleotide” refers to the glycosylamines comprising a nucleobase, a 5-carbon sugar, and one or more phosphate groups, as further described herein. In some embodiments, nucleosides can be phosphorylated by kinases to produce nucleotides.

[0138] “Nucleoside monophosphate” or “NMP” refers to glycosylamines comprising a nucleobase, a 5-carbon sugar (e.g., ribose, deoxyribose, or arabinose), and a phosphate moiety at the 5′-position. In some embodiments herein, “nucleoside monophosphate” is abbreviated as “NMP”. Non-limiting examples of nucleoside monophosphates include cytidine monophosphate (CMP), uridine monophosphate (UMP), adenosine monophosphate (AMP), guanosine monophosphate (GMP), thymidine monophosphate (TMP), and inosine monophosphate (IMP). In some embodiments, “nucleoside monophosphate” may refer to a non-natural nucleoside monophosphate. The terms “nucleoside” and “nucleotide” may be used interchangeably in some contexts.

[0139] “Nucleoside diphosphate” or “NDP” refers to glycosylamines comprising a nucleobase, a 5-carbon sugar (e.g., ribose, deoxyribose, or arabinose), and a diphosphate (i.e., pyrophosphate) moiety at the 5′-position. In some embodiments herein, “nucleoside diphosphate” is abbreviated as “NDP”. Non-limiting examples of nucleoside diphosphates include cytidine diphosphate (CDP), uridine diphosphate (UDP), adenosine diphosphate (ADP), guanosine diphosphate (GDP), thymidine diphosphate (TDP), and inosine diphosphate (IDP). In some embodiments, “nucleoside diphosphate” may refer to a non-natural nucleoside diphosphate. The terms “nucleoside” and “nucleotide” may be used interchangeably in some contexts.

[0140] “Nucleoside triphosphate” or “NTP” refers to glycosylamines comprising a nucleobase, a 5-carbon sugar (e.g., ribose, deoxyribose, or arabinose), and a triphosphate moiety at the 5′-position. In some embodiments herein, “nucleoside triphosphate” is abbreviated as “NTP”. Non-limiting examples of nucleoside triphosphates include cytidine triphosphate (CTP), uridine triphosphate (UTP), adenosine triphosphate (ATP), guanosine triphosphate (GTP), thymidine triphosphate (TTP), and inosine triphosphate (ITP). In some embodiments, “nucleoside triphosphate” may refer to a non-natural nucleoside triphosphate. The terms “nucleoside” and “nucleotide” may be used interchangeably in some contexts.

[0141] “Modified” or “non-natural” in context of a nucleoside or nucleotide refers to a nucleoside or nucleotide that has been altered to a non-naturally occurring nucleoside or nucleotide. In some embodiments, modifications to nucleoside or nucleotides include modifications to the nucleobase, sugar moiety, and/or phosphate. In some embodiments, the common modifications of the 2′-position of the sugar residue with fluoro (F) or —O—CH₃ is denoted by “fN” and “mN”, respectively, where N denotes the nucleobase on the nucleoside or nucleotide. In some embodiments, the presence of a 5′-thiophosphate is denoted by “*N”.

[0142] “Locked nucleoside” or “locked nucleotide” refers to nucleoside or nucleotide, respectively, in which the ribose moiety is modified with a bridge connecting the 2′ oxygen and 4′ carbon (see, e.g., Obika et al., Tetrahedron Letters, 1997, 38(50):8735-8738; Orum et al., Current Pharmaceutical Design, 2008, 14(11):1138-1142). In some embodiments, the bridge is a methylene or ethylene bridge. In some embodiments, the ribose moiety of the locked nucleoside or locked nucleotide is in the C3′-endo (beta-D) or C2′-endo (alpha-L) conformation.

[0143] “Biocatalysis,” “biocatalytic,” “biotransformation,” and “biosynthesis” refer to the use of enzymes to perform chemical reactions on organic compounds.

[0144] “Wild-type” and “naturally occurring” refer to the form found in nature. For example, a wild-type polypeptide or polynucleotide sequence is a sequence present in an organism that can be isolated from a source in nature and which has not been intentionally modified by human manipulation.

[0145] “Recombinant,” “engineered,” “variant,” “non-natural,” and “non-naturally occurring” when used with reference to a cell, nucleic acid, or polypeptide, refers to a material, or a material corresponding to the natural or native form of the material, which has been modified in a manner that would not otherwise exist in nature. In some embodiments, the cell, nucleic acid or polypeptide is identical a naturally occurring cell, nucleic acid or polypeptide, but is produced or derived from synthetic materials and/or by manipulation using recombinant techniques. Non-limiting examples include, among others, recombinant cells expressing genes that are not found within the native (non-recombinant) form of the cell or express native genes that are otherwise expressed at a different level.

[0146] “Percent (%) sequence identity” is used herein to refer to comparisons among polynucleotides or polypeptides, and are determined by comparing two optimally aligned sequences over a comparison window, wherein the portion of the polynucleotide or polypeptide sequence in the comparison window may comprise additions or deletions (i.e., gaps) as compared to the reference sequence for optimal alignment of the two sequences. The percentage may be calculated by determining the number of positions at which the identical nucleic acid base or amino acid residue occurs in both sequences to yield the number of matched positions, dividing the number of matched positions by the total number of positions in the window of comparison and multiplying the result by 100 to yield the percentage of sequence identity. Alternatively, the percentage may be calculated by determining the number of positions at which either the identical nucleic acid base or amino acid residue occurs in both sequences or a nucleic acid base or amino acid residue is aligned with a gap to yield the number of matched positions, dividing the number of matched positions by the total number of positions in the window of comparison and multiplying the result by 100 to yield the percentage of sequence identity. Those of skill in the art appreciate that there are many established algorithms available to align two sequences. Optimal alignment of sequences for comparison can be conducted by any suitable method, including, but not limited to the local homology algorithm of Smith and Waterman (Smith and Waterman, Adv. Appl. Math., 1981, 2:482), by the homology alignment algorithm of Needleman and Wunsch (Needleman and Wunsch, J. Mol. Biol., 1970, 48:443), by the search for similarity method of Pearson and Lipman (Pearson and Lipman, Proc. Natl. Acad. Sci. USA., 1988, 85:2444), by computerized implementations of these algorithms (e.g., GAP, BESTFIT, FASTA, and TFASTA in the GCG Wisconsin Software Package), or by visual inspection, as known in the art. Examples of algorithms that are suitable for determining percent sequence identity and sequence similarity include, but are not limited to the BLAST and BLAST 2.0 algorithms, which are described by Altschul et al. (See Altschul et al., J. Mol. Biol., 1990, 215:403-410; and Altschul et al., Nucl. Acids Res., 1977, 25(17):3389-3402, respectively). Software for performing BLAST analyses is publicly available through the National Center for Biotechnology Information website. This algorithm involves first identifying high scoring sequence pairs (HSPs) by identifying short words of length W in the query sequence, which either match or satisfy some positive-valued threshold score T when aligned with a word of the same length in a database sequence. T is referred to as, the neighborhood word score threshold (See, Altschul et al., supra). These initial neighborhood word hits act as seeds for initiating searches to find longer HSPs containing them. The word hits are then extended in both directions along each sequence for as far as the cumulative alignment score can be increased. Cumulative scores are calculated using, for nucleotide sequences, the parameters M (reward score for a pair of matching residues; always >0) and N (penalty score for mismatching residues; always <0). For amino acid sequences, a scoring matrix is used to calculate the cumulative score. Extension of the word hits in each direction are halted when: the cumulative alignment score falls off by the quantity X from its maximum achieved value; the cumulative score goes to zero or below, due to the accumulation of one or more negative-scoring residue alignments; or the end of either sequence is reached. The BLAST algorithm parameters W, T, and X determine the sensitivity and speed of the alignment. The BLASTN program (for nucleotide sequences) uses as defaults a wordlength (W) of 11, an expectation (E) of 10, M=5, N=−4, and a comparison of both strands. For amino acid sequences, the BLASTP program uses as defaults a word length (W) of 3, an expectation (E) of 10, and the BLOSUM62 scoring matrix (See, Henikoff and Henikoff, Proc. Natl. Acad. Sci. USA, 1989, 89:10915). Exemplary determination of sequence alignment and % sequence identity can employ the BESTFIT or GAP programs in the GCG Wisconsin Software package (Accelrys, Madison WI), using default parameters provided.

[0147] “Substantial identity” refers to a polynucleotide or polypeptide sequence that has at least 80 percent sequence identity, at least 85 percent identity, at least between 89 to 95 percent sequence identity, or more usually, at least 99 percent sequence identity as compared to a reference sequence over a comparison window of at least 20 residue positions, frequently over a window of at least 30-50 residues, wherein the percentage of sequence identity is calculated by comparing the reference sequence to a sequence that includes deletions or additions which total 20 percent or less of the reference sequence over the window of comparison. In some specific embodiments applied to polypeptides, the term “substantial identity” means that two polypeptide sequences, when optimally aligned, such as by the programs GAP or BESTFIT using default gap weights, share at least 80 percent sequence identity, preferably at least 89 percent sequence identity, at least 95 percent sequence identity or more (e.g., 99 percent sequence identity). In some embodiments, residue positions that are not identical in sequences being compared differ by conservative amino acid substitutions.

[0148] “Reference sequence” refers to a defined sequence used as a basis for a sequence and/or activity comparison. A reference sequence may be a subset of a larger sequence, for example, a segment of a full-length gene or polypeptide sequence. Generally, a reference sequence is at least 20 nucleotide or amino acid residues in length, at least 25 residues in length, at least 50 residues in length, at least 100 residues in length or the full length of the nucleic acid or polypeptide. Since two polynucleotides or polypeptides may each (1) comprise a sequence (i.e., a portion of the complete sequence) that is similar between the two sequences, and (2) may further comprise a sequence that is divergent between the two sequences, sequence comparisons between two (or more) polynucleotides or polypeptides are typically performed by comparing sequences of the two polynucleotides or polypeptides over a “comparison window” to identify and compare local regions of sequence similarity. In some embodiments, a “reference sequence” can be based on a primary amino acid sequence, where the reference sequence is a sequence that can have one or more changes in the primary sequence.

[0149] “Comparison window” refers to a conceptual segment of contiguous nucleotide positions or amino acids residues wherein a sequence may be compared to a reference sequence. In some embodiments, the comparison window is at least 15 to 20 contiguous nucleotides or amino acids and wherein the portion of the sequence in the comparison window may comprise additions or deletions (i.e., gaps) of 20 percent or less as compared to the reference sequence (which does not comprise additions or deletions) for optimal alignment of the two sequences. In some embodiments, the comparison window can be longer than 15-20 contiguous residues, and includes, optionally 30, 40, 50, 100, or longer windows.

[0150] “Corresponding to,” “reference to,” and “relative to” when used in the context of the numbering of a given amino acid or polynucleotide sequence refer to the numbering of the residues of a specified reference sequence when the given amino acid or polynucleotide sequence is compared to the reference sequence. In other words, the residue number or residue position of a given polymer is designated with respect to the reference sequence rather than by the actual numerical position of the residue within the given amino acid or polynucleotide sequence. For example, a given amino acid sequence, such as that of an engineered adenylate kinase, can be aligned to a reference sequence by introducing gaps to optimize residue matches between the two sequences. In these cases, although the gaps are present, the numbering of the residue in the given amino acid or polynucleotide sequence is made with respect to the reference sequence to which it has been aligned.

[0151] “Amino acid difference”, “residue difference” and “substitution” refer to a difference in the amino acid residue at a position of a polypeptide sequence relative to the amino acid residue at a corresponding position in a reference sequence. The positions of amino acid differences generally are referred to herein as “Xn,” where n refers to the corresponding position in the reference sequence upon which the residue difference is based. For example, a “residue difference at position X13 as compared to SEQ ID NO: 2” refers to a difference of the amino acid residue at the polypeptide position corresponding to position 13 of SEQ ID NO: 2. Thus, if the reference polypeptide of SEQ ID NO: 2 has a methionine at position 13, then a “residue difference at position X13 as compared to SEQ ID NO: 2” refers to an amino acid substitution of any residue other than methionine at the position of the polypeptide corresponding to position 13 of SEQ ID NO: 2. In most instances herein, the specific amino acid residue difference at a position is indicated as “XnY” where “Xn” specified the corresponding position as described above, and “Y” is the single letter identifier of the amino acid found in the engineered polypeptide (i.e., the different residue than in the reference polypeptide). In some instances (e.g., in the Tables presented in the Examples), the present invention also provides specific amino acid differences denoted by the conventional notation “AnB”, where A is the single letter identifier of the residue in the reference sequence, “n” is the number of the residue position in the reference sequence, and B is the single letter identifier of the residue substitution in the sequence of the engineered polypeptide. In some instances, an amino acid residue difference or substitution may be a deletion and may be denoted by a “−”. In some instances, a polypeptide of the present invention can include one or more amino acid residue differences relative to a reference sequence, which is indicated by a list of the specified positions where residue differences are present relative to the reference sequence. In some embodiments, the amino acid difference, e.g., a substitution, is denoted by the abbreviation “nB,” without the identifier for the residue in the reference sequence. In some embodiments, the phrase “an amino acid residue nB” denotes the presence of the amino residue in the engineered polypeptide, which may or may not be a substitution in context of a reference polypeptide or amino acid sequence.

[0152] In some instances, a polypeptide of the present disclosure can include one or more amino acid residue differences relative to a reference sequence, which is indicated by a list of the specified positions where residue differences are present relative to the reference sequence. In some embodiments, where more than one amino acid can be used in a specific residue position of a polypeptide, the various amino acid residues that can be used are separated by a “/” (e.g., X13G/X13S, X13G/S, or 13G/S).

[0153] “Amino acid substitution set” or “substitution set” refers to a group of amino acid substitutions in a polypeptide sequence, as compared to a reference sequence. A substitution set can have 2, 3, 4, 5, 6, 7, 8, 9, 10, 11, 12, 13, 14, 15, or more amino acid substitutions. In some embodiments, a substitution set refers to the set of amino acid substitutions that is present in any of the variant adenylate kinases listed in the Tables provided in the Examples. In these substitution sets, the individual substitutions are separated by a semicolon (“;”; e.g., Y29Q;A30S) or slash (“/”; e.g., Y29Q/A30S or 29Q/30S).

[0154] “Conservative amino acid substitution” refers to a substitution of a residue with a different residue having a similar side chain, and thus typically involves substitution of the amino acid in the polypeptide with amino acids within the same or similar defined class of amino acids. By way of example and not limitation, in some embodiments, an amino acid with an aliphatic side chain is substituted with another aliphatic amino acid (e.g., alanine, valine, leucine, and isoleucine); an amino acid with an hydroxyl side chain is substituted with another amino acid with an hydroxyl side chain (e.g., serine and threonine); an amino acids having aromatic side chains is substituted with another amino acid having an aromatic side chain (e.g., phenylalanine, tyrosine, tryptophan, and histidine); an amino acid with a basic side chain is substituted with another amino acid with a basis side chain (e.g., lysine and arginine); an amino acid with an acidic side chain is substituted with another amino acid with an acidic side chain (e.g., aspartic acid or glutamic acid); and/or a hydrophobic or hydrophilic amino acid is replaced with another hydrophobic or hydrophilic amino acid, respectively.

[0155] “Non-conservative substitution” refers to substitution of an amino acid in the polypeptide with an amino acid with significantly differing side chain properties. Non-conservative substitutions may use amino acids between, rather than within, the defined groups and affects (a) the structure of the peptide backbone in the area of the substitution (e.g., proline for glycine) (b) the charge or hydrophobicity, or (c) the bulk of the side chain. By way of example and not limitation, an exemplary non-conservative substitution can be an acidic amino acid substituted with a basic or aliphatic amino acid; an aromatic amino acid substituted with a small amino acid; and a hydrophilic amino acid substituted with a hydrophobic amino acid.

[0156] “Deletion” refers to modification to the polypeptide by removal of one or more amino acids from the reference polypeptide. Deletions can comprise removal of 1 or more amino acids, 2 or more amino acids, 5 or more amino acids, 10 or more amino acids, 15 or more amino acids, or 20 or more amino acids, up to 10% of the total number of amino acids, or up to 20% of the total number of amino acids making up the reference enzyme while retaining enzymatic activity and/or retaining the improved properties of an engineered adenylate kinase enzyme. Deletions can be directed to the internal portions and/or terminal portions of the polypeptide. In various embodiments, the deletion can comprise a continuous segment or can be discontinuous. Deletions are typically indicated by “−” in amino acid sequences.

[0157] “Insertion” refers to modification to the polypeptide by addition of one or more amino acids to the reference polypeptide. Insertions can be in the internal portions of the polypeptide, or to the carboxy or amino terminus. Insertions as used herein include fusion proteins as is known in the art. The insertion can be a contiguous segment of amino acids or separated by one or more of the amino acids in the naturally occurring polypeptide.

[0158] “Functional fragment” and “biologically active fragment” are used interchangeably herein to refer to a polypeptide that has an amino-terminal and/or carboxy-terminal deletion(s) and/or internal deletions, but where the remaining amino acid sequence is identical to the corresponding positions in the sequence to which it is being compared (e.g., a full-length engineered adenylate kinase of the present invention) and that retains substantially all of the activity of the full-length polypeptide.

[0159] “Isolated polypeptide” refers to a polypeptide which is substantially separated from other contaminants that naturally accompany it (e.g., protein, lipids, and polynucleotides). The term embraces polypeptides which have been removed or purified from their naturally occurring environment or expression system (e.g., within a host cell or via in vitro synthesis). The recombinant adenylate kinase polypeptides may be present within a cell, present in the cellular medium, or prepared in various forms, such as lysates or isolated preparations. As such, in some embodiments, the recombinant adenylate kinase polypeptides can be an isolated polypeptide.

[0160] “Substantially pure polypeptide” or “purified protein” refers to a composition in which the polypeptide species is the predominant species present (i.e., on a molar or weight basis it is more abundant than any other individual macromolecular species in the composition), and is generally a substantially purified composition when the object species comprises at least about 50 percent of the macromolecular species present by mole or % weight. However, in some embodiments, the composition comprising adenylate kinase comprises adenylate kinase that is less than 50% pure (e.g., about 10%, about 20%, about 30%, about 40%, or about 50%). Generally, a substantially pure adenylate kinase composition comprises about 60% or more, about 70% or more, about 80% or more, about 90% or more, about 95% or more, and about 98% or more of all macromolecular species by mole or % weight present in the composition. In some embodiments, the object species is purified to essential homogeneity (i.e., contaminant species cannot be detected in the composition by conventional detection methods) wherein the composition consists essentially of a single macromolecular species. Solvent species, small molecules (<500 Daltons), and elemental ion species are not considered macromolecular species. In some embodiments, the isolated recombinant adenylate kinase polypeptides are substantially pure polypeptide compositions.

[0161] “Improved enzyme property” refers to at least one improved property of an enzyme. In some embodiments, the present invention provides engineered adenylate kinase polypeptides that exhibit an improvement in any enzyme property as compared to a reference adenylate kinase polypeptide and/or a wild-type adenylate kinase polypeptide, and/or another engineered adenylate kinase polypeptide. Thus, the level of “improvement” can be determined and compared between various adenylate kinase polypeptides, including wild-type, as well as engineered adenylate kinases. Improved properties include, but are not limited, to such properties as increased protein expression, increased thermoactivity, increased thermostability, increased pH activity, increased stability, increased enzymatic activity, increased substrate specificity or affinity, increased specific activity, increased resistance to substrate or end-product inhibition, increased chemical stability, improved chemoselectivity, improved solvent stability, increased tolerance to acidic pH, increased tolerance to proteolytic activity (i.e., reduced sensitivity to proteolysis), reduced aggregation, increased solubility, and altered temperature profile. In additional embodiments, the term is used in reference to the at least one improved property of adenylate kinase enzymes. In some embodiments, the present invention provides adenylate kinase polypeptides that exhibit an improvement in any enzyme property as compared to a reference adenylate kinase polypeptide and/or a wild-type adenylate kinase polypeptide, and/or another engineered adenylate kinase polypeptide. Thus, the level of “improvement” can be determined and compared between various adenylate kinase polypeptides, including wild-type, as well as engineered adenylate kinases.

[0162] “Increased enzymatic activity” and “enhanced catalytic activity” refer to an improved property of the engineered polypeptides, which can be represented by an increase in specific activity (e.g., product produced/time/weight protein) or an increase in percent conversion of the substrate to the product (e.g., percent conversion of starting amount of substrate to product in a specified time period using a specified amount of enzyme) as compared to the reference enzyme. In some embodiments, the terms refer to an improved property of engineered adenylate kinase polypeptides provided herein, which can be represented by an increase in specific activity (e.g., product produced/time/weight protein) or an increase in percent conversion of the substrate to the product (e.g., percent conversion of starting amount of substrate to product in a specified time period using a specified amount of adenylate kinase) as compared to the reference adenylate kinase enzyme. In some embodiments, the terms are used in reference to improved adenylate kinase enzymes provided herein. Exemplary methods to determine enzyme activity of the engineered adenylate kinases of the present invention are provided in the Examples. Any property relating to enzyme activity may be affected, including the classical enzyme properties of Kₘ, Vₘₐₓ or k_{cat}, changes of which can lead to increased enzymatic activity. For example, improvements in enzyme activity can be from about 1.1 fold the enzymatic activity of the corresponding wild-type enzyme, to as much as 2-fold, 5-fold, 10-fold, 20-fold, 25-fold, 50-fold, 75-fold, 100-fold, 150-fold, 200-fold or more enzymatic activity than the naturally occurring adenylate kinase or another engineered adenylate kinase from which the adenylate kinase polypeptides were derived.

[0163] “Conversion” refers to the enzymatic conversion (or biotransformation) of a substrate(s) to the corresponding product(s). “Percent conversion” refers to the percent of the substrate that is converted to the product within a period of time under specified conditions. Thus, the “enzymatic activity” or “activity” of an adenylate kinase polypeptide can be expressed as “percent conversion” of the substrate to the product in a specific period of time.

[0164] “Stringent hybridization conditions” is used herein to refer to conditions under which nucleic acid hybrids are stable. As known to those of skill in the art, the stability of hybrids is reflected in the melting temperature (Tm) of the hybrids. In general, the stability of a hybrid is a function of ion strength, temperature, G/C content, and the presence of chaotropic agents. The T. values for polynucleotides can be calculated using known methods for predicting melting temperatures (See e.g., Baldino et al., Meth. Enzymol., 1989, 168:761-777; Bolton et al., Proc. Natl. Acad. Sci. USA., 1962, 48:1390; Bresslauer et al., Proc. Natl. Acad. Sci. USA, 1986, 83:8893-8897; Freier et al., Proc. Natl. Acad. Sci. USA., 1986, 83:9373-9377; Kierzek et al., Biochem., 1986, 25:7840-7846; Rychlik et al., Nucl. Acids Res., 1990, 18:6409-6412 (erratum, Nucl. Acids Res., 1991, 19:698); Sambrook et al., supra); Suggs et al., 1981, in “Developmental Biology Using Purified Genes,” Brown et al. [eds.], pp. 683-693, Academic Press, Cambridge, MA (1981); and Wetmur, Crit. Rev. Biochem. Mol. Biol., 1991, 26:227-259). In some embodiments, the polynucleotide encodes the polypeptide disclosed herein and hybridizes under defined conditions, such as moderately stringent or highly stringent conditions, to the complement of a sequence encoding an engineered adenylate kinase enzyme of the present invention.

[0165] “Hybridization stringency” relates to hybridization conditions, such as washing conditions, in the hybridization of nucleic acids. Generally, hybridization reactions are performed under conditions of lower stringency, followed by washes of varying but higher stringency (see, e.g., Sambrook et al., Molecular Cloning: A Laboratory Manual, Cold Spring Harbor Laboratory Press, New York, 2001; Ausubel et al., Current Protocols in Molecular Biology, John Wiley & Sons, 2003). The term “moderately stringent hybridization” refers to conditions that permit target-DNA to bind a complementary nucleic acid that has about 60% identity, preferably about 75% identity, about 85% identity to the target DNA, with greater than about 90% identity to target-polynucleotide. Exemplary moderately stringent conditions are conditions equivalent to hybridization in 50% formamide, 5×Denhart's solution, 5×SSPE, 0.2% SDS at 42° C., followed by washing in 0.2×SSPE, 0.2% SDS, at 42° C. “High stringency hybridization” refers generally to conditions that are about 10° C. or less from the thermal melting temperature T. as determined under the solution condition for a defined polynucleotide sequence. In some embodiments, a high stringency condition refers to conditions that permit hybridization of only those nucleic acid sequences that form stable hybrids in 0.018M NaCl at 65° C. (i.e., if a hybrid is not stable in 0.018M NaCl at 65° C., it will not be stable under high stringency conditions, as contemplated herein). High stringency conditions can be provided, for example, by hybridization in conditions equivalent to 50% formamide, 5×Denhart's solution, 5×SSPE, 0.2% SDS at 42° C., followed by washing in 0.1×SSPE, and 0.1% SDS at 65° C. Another high stringency condition is hybridizing in conditions equivalent to hybridizing in 5×SSC containing 0.1% (w/v) SDS at 65° C. and washing in 0.1×SSC containing 0.1% SDS at 65° C. Other high stringency hybridization conditions, as well as moderately stringent conditions, are described in the references cited above.

[0166] “Coding sequence” refers to that portion of a nucleic acid (e.g., a gene) that encodes an amino acid sequence of a protein.

[0167] “Codon optimized” refers to changes in the codons of the polynucleotide encoding a protein to those preferentially used in a particular organism such that the encoded protein is efficiently expressed in the organism of interest. Although the genetic code is degenerate in that most amino acids are represented by several codons, called “synonyms” or “synonymous” codons, it is well known that codon usage by particular organisms is nonrandom and biased towards particular codon triplets. This codon usage bias may be higher in reference to a given gene, genes of common function or ancestral origin, highly expressed proteins versus low copy number proteins, and the aggregate protein coding regions of an organism's genome. In some embodiments, the polynucleotides encoding the adenylate kinase enzymes may be codon optimized for optimal production in the host organism selected for expression.

[0168] “Preferred,” “optimal,” and “high codon usage bias” codons when used alone or in combination refer(s) interchangeably to codons that are used at higher frequency in the protein coding regions than other codons that code for the same amino acid. The preferred codons may be determined in relation to codon usage in a single gene, a set of genes of common function or origin, highly expressed genes, the codon frequency in the aggregate protein coding regions of the whole organism, codon frequency in the aggregate protein coding regions of related organisms, or combinations thereof. Codons whose frequency increases with the level of gene expression are typically optimal codons for expression. A variety of methods are known for determining the codon frequency (e.g., codon usage, relative synonymous codon usage) and codon preference in specific organisms, including multivariate analysis, for example, using cluster analysis or correspondence analysis, and the effective number of codons used in a gene (See e.g., GCG CodonPreference, Genetics Computer Group Wisconsin Package; CodonW, Peden, University of Nottingham; McInerney, Bioinform., 1998, 14:372-73; Stenico et al., Nucl. Acids Res., 1994, 222437-46; and Wright, Gene, 1990, 87:23-29). Codon usage tables are available for many different organisms (See e.g., Wada et al., Nucl. Acids Res., 1992, 20:2111-2118; Nakamura et al., Nucl. Acids Res., 2000, 28:292; Duret, et al., supra; Henaut and Danchin, in Escherichia coli and Salmonella, Neidhardt, et al. (eds.), ASM Press, Washington D.C., p. 2047-2066 (1996)). The data source for obtaining codon usage may rely on any available nucleotide sequence capable of coding for a protein. These data sets include nucleic acid sequences actually known to encode expressed proteins (e.g., complete protein coding sequences-CDS), expressed sequence tags (ESTS), or predicted coding regions of genomic sequences (See e.g., Mount, “Bioinformatics: Sequence and Genome Analysis,” Chapter 8, Cold Spring Harbor Laboratory Press, Cold Spring Harbor, N.Y. (2001); Uberbacher, Meth. Enzymol., 1996, 266:259-281; and Tiwari et al., Comput. Appl. Biosci., 1997, 13:263-270).

[0169] “Control sequence” refers herein to include all components, which are necessary or advantageous for the expression of a polynucleotide and/or polypeptide of the present application. Each control sequence may be native or foreign to the nucleic acid sequence encoding the polypeptide. Such control sequences include, but are not limited to, a leader, polyadenylation sequence, pro-peptide sequence, promoter sequence, signal peptide sequence, initiation sequence and transcription terminator. In some embodiments, the control sequences include a promoter, and transcriptional and translational stop signals.

[0170] “Operably linked” or “operatively linked” is defined herein as a configuration in which a control sequence is appropriately placed (i.e., in a functional relationship) at a position relative to a polynucleotide of interest such that the control sequence directs or regulates the expression of the polynucleotide, and where appropriate the encoded polypeptide of interest.

[0171] “Promoter sequence” refers to a nucleic acid sequence that defines and/or initiates expression of a polynucleotide of interest, such as a coding sequence. The promoter sequence contains transcriptional control sequences, which mediate the expression of a polynucleotide of interest. The promoter may be any nucleic acid sequence which shows transcriptional activity in the host cell of choice including mutant, truncated, and hybrid promoters, and may be obtained from genes encoding extracellular or intracellular polypeptides either homologous or heterologous to the host cell.

[0172] “Heterologous” refers to the relationship between two or more nucleic acid or protein sequences (e.g., a promoter sequence, signal peptide, terminator sequence, etc.) that are derived from different sources and are not associated in nature.

[0173] “Vector” refers to a polynucleotide construct for introducing a polynucleotide sequence into a cell. In some embodiments, the vector is an expression vector that is operably linked to a suitable control sequence capable of effecting the expression in a suitable host of the polynucleotide of interest and where appropriate the encoded polypeptide.

[0174] “Expression” includes any step involved in the production of the polypeptide including, but not limited to, transcription, post-transcriptional modification, translation, and post-translational modification. In some embodiments, the term also encompasses secretion of the polypeptide from a cell.

[0175] “Produces” refers to the production of proteins and/or other compounds by cells. It is intended that the term encompass any step involved in the production of polypeptides including, but not limited to, transcription, post-transcriptional modification, translation, and post-translational modification. In some embodiments, the term also encompasses secretion of the polypeptide from a cell.

[0176] “Culturing” refers to the growing of a population of microbial cells under any suitable conditions (e.g., using a liquid, gel or solid medium).

[0177] “Host cell” and “host strain” refer to suitable hosts for expression vectors comprising DNA provided herein (e.g., the polynucleotides encoding the adenylate kinase variants). In some embodiments, the host cells are prokaryotic or eukaryotic cells that have been transformed or transfected with vectors constructed using recombinant DNA techniques as known in the art.

[0178] “pH stable” refers to an adenylate kinase polypeptide that maintains similar activity (e.g., more than 60% to 80%) after exposure to high or low pH (e.g., 4.5-6 or 8 to 12) for a period of time (e.g., 0.5-24 hrs) compared to the untreated enzyme.

[0179] “Thermostable” refers to an adenylate kinase polypeptide that maintains similar activity (more than 60% to 80% for example) after exposure to elevated temperatures (e.g., 40-80° C.) for a period of time (e.g., 0.5-24 h) compared to the wild-type enzyme exposed to the same elevated temperature.

[0180] “Solvent stable” refers to an adenylate kinase polypeptide that maintains similar activity (more than e.g., 60% to 80%) after exposure to varying concentrations (e.g., 5-99%) of solvent (ethanol, isopropyl alcohol, dimethylsulfoxide [DMSO], tetrahydrofuran, 2-methyltetrahydrofuran, acetone, toluene, butyl adenylate, methyl tert-butyl ether, etc.) for a period of time (e.g., 0.5-24 h) compared to the wild-type enzyme exposed to the same concentration of the same solvent.

[0181] “Thermo- and solvent stable” refers to an adenylate kinase polypeptide that is both thermostable and solvent stable.

[0182] “Stereoselectivity” refers to the preferential formation in a chemical or enzymatic reaction of one stereoisomer over another. Stereoselectivity can be partial, where the formation of one stereoisomer is favored over the other, or it may be complete where only one stereoisomer is formed. When the stereoisomers are enantiomers, the stereoselectivity is referred to as enantioselectivity, the fraction (typically reported as a percentage) of one enantiomer in the sum of both. It is commonly alternatively reported in the art (typically as a percentage) as the enantiomeric excess (“e.e.”) calculated therefrom according to the formula [major enantiomer−minor enantiomer]/[major enantiomer+minor enantiomer]. Where the stereoisomers are diastereoisomers, the stereoselectivity is referred to as diastereoselectivity, the fraction (typically reported as a percentage) of one diastereomer in a mixture of two diastereomers, commonly alternatively reported as the diastereomeric excess (“d.e.”). Enantiomeric excess and diastereomeric excess are types of stereomeric excess.

[0183] “Regioselectivity” and “regioselective reaction” refer to a reaction in which one direction of bond making or breaking occurs preferentially over all other possible directions. Reactions can completely (100%) regioselective if the discrimination is complete, substantially regioselective (at least 75%), or partially regioselective (x %, wherein the percentage is set dependent upon the reaction of interest), if the product of reaction at one site predominates over the product of reaction at other sites.

[0184] “Chemoselectivity” refers to the preferential formation in a chemical or enzymatic reaction of one product over another.

[0185] “Suitable reaction conditions” refers to those conditions in the enzymatic conversion reaction solution (e.g., ranges of enzyme loading, substrate loading, temperature, pH, buffers, co-solvents, etc.) under which an adenylate kinase polypeptide of the present invention is capable of converting a substrate to the desired product compound. Some exemplary “suitable reaction conditions” are provided herein.

[0186] “Loading,” such as in “compound loading” or “enzyme loading” refers to the concentration or amount of a component in a reaction mixture at the start of the reaction.

[0187] “Substrate” in the context of an enzymatic conversion reaction process refers to the compound or molecule acted on by the engineered enzymes provided herein (e.g., engineered adenylate kinase polypeptides).

[0188] “Product” in the context of an enzymatic conversion process refers to the compound or molecule resulting from the action of an enzymatic polypeptide on a substrate.

[0189] “Increasing” yield of a product (e.g., a nucleoside triphosphate or analogue) from a reaction occurs when a particular component present during the reaction (e.g., an adenylate kinase enzyme) causes more product to be produced, compared with a reaction conducted under the same conditions with the same substrate and other substituents, but in the absence of the component of interest.

[0190] “Substantially free” of a particular enzyme if the amount of that enzyme compared with other enzymes that participate in catalyzing the reaction is less than about 2%, about 1%, or about 0.1% (wt/wt).

[0191] “Fractionating” a liquid (e.g., a culture broth) means applying a separation process (e.g., salt precipitation, column chromatography, size exclusion, and filtration) or a combination of such processes to provide a solution in which a desired protein comprises a greater percentage of total protein in the solution than in the initial liquid product.

[0192] “Alkyl” refers to saturated hydrocarbon groups of from 1 to 18 carbon atoms inclusively, either straight chained or branched, more preferably from 1 to 8 carbon atoms inclusively, and most preferably 1 to 6 carbon atoms inclusively. An alkyl with a specified number of carbon atoms is denoted in parenthesis (e.g., (C₁-C₄)alkyl refers to an alkyl of 1 to 4 carbon atoms).

[0193] “Alkenyl” refers to groups of from 2 to 12 carbon atoms inclusively, either straight or branched containing at least one double bond but optionally containing more than one double bond.

[0194] “Alkynyl” refers to groups of from 2 to 12 carbon atoms inclusively, either straight or branched containing at least one triple bond but optionally containing more than one triple bond, and additionally optionally containing one or more double bonded moieties.

[0195] “Heteroalkyl, “heteroalkenyl,” and heteroalkynyl,” refer to alkyl, alkenyl and alkynyl as defined herein in which one or more of the carbon atoms are each independently replaced with the same or different heteroatoms or heteroatomic groups. Heteroatoms and/or heteroatomic groups which can replace the carbon atoms include, but are not limited to, —O—, —S—, —S—O—, —NR′—, —PH—, —S(O)—, —S(O)2-, —S(O)NR′—, —S(O)2NR′—, and the like, including combinations thereof, where each Rα is independently selected from hydrogen, alkyl, heteroalkyl, cycloalkyl, heterocycloalkyl, aryl, and heteroaryl.

[0196] “Alkoxy” refers to the group —OR′ wherein R′ is an alkyl group is as defined above including optionally substituted alkyl groups as also defined herein.

[0197] “Amino” refers to the group —NH₁. Substituted amino refers to the group —NHR′, NR′R′, and NR′R′R′, where each R′ is independently selected from substituted or unsubstituted alkyl, cycloalkyl, cycloheteroalkyl, alkoxy, aryl, heteroaryl, heteroarylalkyl, acyl, alkoxycarbonyl, sulfanyl, sulfinyl, sulfonyl, and the like. Typical amino groups include, but are limited to, dimethylamino, diethylamino, trimethylammonium, triethylammonium, methylysulfonylamino, furanyl-oxy-sulfamino, and the like.

[0198] “Oxo” refers to ═O.

[0199] “Oxy” refers to a divalent group —O—, which may have various substituents to form different oxy groups, including ethers and esters.

[0200] “Carboxy” refers to —COOH.

[0201] “Carbonyl” refers to —C(O)—, which may have a variety of substituents to form different carbonyl groups including acids, acid halides, aldehydes, amides, esters, and ketones.

[0202] “Alkyloxycarbonyl” refers to —C(O)OR′, where R′ is an alkyl group as defined herein, which can be optionally substituted.

[0203] As used herein, “aminocarbonyl” refers to —C(O)NH₂. Substituted aminocarbonyl refers to —C(O)NR′R′, where the amino group NR′R′ is as defined herein.

[0204] “Halogen” and “halo” refer to fluoro, chloro, bromo and iodo.

[0205] “Hydroxy” refers to —OH.

[0206] “Cyano” refers to —CN.

[0207] “Aryl” refers to an unsaturated aromatic carbocyclic group of from 6 to 12 carbon atoms inclusively having a single ring (e.g., phenyl) or multiple condensed rings (e.g., naphthyl or anthryl). Exemplary aryls include phenyl, pyridyl, naphthyl and the like.

[0208] “Heterocycle,” “heterocyclic,” and interchangeably “heterocycloalkyl,” refer to a saturated or unsaturated group having a single ring or multiple condensed rings, from 2 to 10 carbon ring atoms inclusively and from 1 to 4 hetero ring atoms inclusively selected from nitrogen, sulfur or oxygen within the ring. Such heterocyclic groups can have a single ring (e.g., piperidinyl or tetrahydrofuryl) or multiple condensed rings (e.g., indolinyl, dihydrobenzofuran or quinuclidinyl). Examples of heterocycles include, but are not limited to, furan, thiophene, thiazole, oxazole, pyrrole, imidazole, pyrazole, pyridine, pyrazine, pyrimidine, pyridazine, indolizine, isoindole, indole, indazole, purine, quinolizine, isoquinoline, quinoline, phthalazine, naphthylpyridine, quinoxaline, quinazoline, cinnoline, pteridine, carbazole, carboline, phenanthridine, acridine, phenanthroline, isothiazole, phenazine, isoxazole, phenoxazine, phenothiazine, imidazolidine, imidazoline, piperidine, piperazine, pyrrolidine, indoline and the like.

[0209] “Heteroaryl” refers to an aromatic heterocyclic group of from 1 to 10 carbon atoms inclusively and 1 to 4 heteroatoms inclusively selected from oxygen, nitrogen and sulfur within the ring. Such heteroaryl groups can have a single ring (e.g., pyridyl or furyl) or multiple condensed rings (e.g., indolizinyl or benzothienyl).

[0210] “Heteroarylalkyl” refers to an alkyl substituted with a heteroaryl (i.e., heteroaryl-alkyl-groups), preferably having from 1 to 6 carbon atoms inclusively in the alkyl moiety and from 5 to 12 ring atoms inclusively in the heteroaryl moiety. Such heteroarylalkyl groups are exemplified by pyridylmethyl and the like.

[0211] “Heteroarylalkenyl” refers to an alkenyl substituted with a heteroaryl (i.e., heteroaryl-alkenyl-groups), preferably having from 2 to 6 carbon atoms inclusively in the alkenyl moiety and from 5 to 12 ring atoms inclusively in the heteroaryl moiety.

[0212] “Heteroarylalkynyl” refers to an alkynyl substituted with a heteroaryl (i.e., heteroaryl-alkynyl-groups), preferably having from 2 to 6 carbon atoms inclusively in the alkynyl moiety and from 5 to 12 ring atoms inclusively in the heteroaryl moiety.

[0213] “Membered ring” is meant to embrace any cyclic structure. The number preceding the term “membered” denotes the number of skeletal atoms that constitute the ring. Thus, for example, cyclohexyl, pyridine, pyran and thiopyran are 6-membered rings and cyclopentyl, pyrrole, furan, and thiophene are 5-membered rings.

[0214] “Phosphate” as used herein refers to a functional group comprised of an orthophosphate ion (phosphorous atom covalently linked to four oxygen atoms). The orthophosphate ion is commonly found with one or more hydrogen atoms or organic groups. A phosphate group or chain may be modified, as further described herein.

[0215] “Phosphorylated” as used herein refers to the addition or presence of one of more phosphoryl groups (phosphorous atom covalently linked to the three oxygen atoms).

[0216] “Thiophosphate” refers to an instance where a non-bridging oxygen in a phosphate group of a phosphodiester bond, NMP, NDP, NTP or NQP is replaced with a sulfur. In some embodiments, nucleoside 5′-thiomonophosphate is referred to as NMP-S or NMPαS. In some embodiments, nucleoside-5′-1-thio(diphosphate) and nucleoside-5′-1-thio(triphosphate) are referred to as NDPαS or αS-NDP, and NTPaS or αS-NTP, respectively. In some embodiments, nucleoside-5′-2-thio(diphosphate) and nucleoside-5′-2-thio(triphosphate) are referred to as NDPβS and NTPβS, respectively.

[0217] “Dithiophosphate” refers to an instance where two non-bridging oxygens in a phosphate group of a phosphodiester bond, NMP, NDP, NTP or NQP are replaced with two sulfurs.

[0218] Unless otherwise specified, positions occupied by hydrogen in the foregoing groups can be further substituted with substituents exemplified by, but not limited to, hydroxy, oxo, nitro, methoxy, ethoxy, alkoxy, substituted alkoxy, trifluoromethoxy, haloalkoxy, fluoro, chloro, bromo, iodo, halo, methyl, ethyl, propyl, butyl, alkyl, alkenyl, alkynyl, substituted alkyl, trifluoromethyl, haloalkyl, hydroxyalkyl, alkoxyalkyl, thio, alkylthio, acyl, carboxy, alkoxycarbonyl, carboxamido, substituted carboxamido, alkylsulfonyl, alkylsulfinyl, alkylsulfonylamino, sulfonamido, substituted sulfonamido, cyano, amino, substituted amino, alkylamino, dialkylamino, aminoalkyl, acylamino, amidino, amidoximo, hydroxamoyl, phenyl, aryl, substituted aryl, aryloxy, arylalkyl, arylalkenyl, arylalkynyl, pyridyl, imidazolyl, heteroaryl, substituted heteroaryl, heteroaryloxy, heteroarylalkyl, heteroarylalkenyl, heteroarylalkynyl, cyclopropyl, cyclobutyl, cyclopentyl, cyclohexyl, cycloalkyl, cycloalkenyl, cycloalkylalkyl, substituted cycloalkyl, cycloalkyloxy, pyrrolidinyl, piperidinyl, morpholino, heterocycle, (heterocycle)oxy, and (heterocycle)alkyl; and preferred heteroatoms are oxygen, nitrogen, and sulfur. It is understood that where open valences exist on these substituents they can be further substituted with alkyl, cycloalkyl, aryl, heteroaryl, and/or heterocycle groups, that where these open valences exist on carbon they can be further substituted by halogen and by oxygen-, nitrogen-, or sulfur-bonded substituents, and where multiple such open valences exist, these groups can be joined to form a ring, either by direct formation of a bond or by formation of bonds to a new heteroatom, preferably oxygen, nitrogen, or sulfur. It is further understood that the above substitutions can be made provided that replacing the hydrogen with the substituent does not introduce unacceptable instability to the molecules of the present invention, and is otherwise chemically reasonable.

[0219] “Optional” and “optionally” mean that the subsequently described event or circumstance may or may not occur, and that the description includes instances where the event or circumstance occurs and instances in which it does not. One of ordinary skill in the art would understand that with respect to any molecule described as containing one or more optional substituents, only sterically practical and/or synthetically feasible compounds are meant to be included.

[0220] “Optionally substituted” refers to all subsequent modifiers in a term or series of chemical groups. For example, in the term “optionally substituted arylalkyl, the “alkyl” portion and the “aryl” portion of the molecule may or may not be substituted, and for the series “optionally substituted alkyl, cycloalkyl, aryl and heteroaryl,” the alkyl, cycloalkyl, aryl, and heteroaryl groups, independently of the others, may or may not be substituted.

### Engineered Adenylate Kinase Polypeptides

[0221] In one aspect, the present disclosure provides adenylate kinase enzymes engineered to have improved properties compared to the parent adenylate kinase enzyme. In some embodiments, the engineered adenylate kinase enzymes exhibit, among others, increased activity on nucleoside monophosphate (NMP) substrates, increased thermostability, and/or increased activity on modified NMP substrates. The engineered adenylate kinases are useful in the conversion of nucleoside monophosphate substrates to their corresponding nucleoside diphosphate products, particularly in enzyme cascade systems.

[0222] In some embodiments, an engineered adenylate kinase comprises an amino acid sequence having at least 70%, 75%, 80%, 81%, 82%, 83%, 84%, 85%, 86%, 87%, 88%, 89%, 90%, 91%, 92%, 93%, 94%, 95%, 96%, 97%, 98%, 99%, or more sequence identity to a reference sequence corresponding to amino acid residues 12-231 of an even-numbered SEQ ID NO. of SEQ ID NOs: 2-1302, 1356-2652, and 2676-3192, or to a reference sequence corresponding to an even-numbered SEQ ID NO. of SEQ ID NOs: 2-1302, 1356-2652, and 2676-3192, wherein the amino acid sequence comprises one or more substitutions relative to a reference sequence corresponding to amino acid residues 12-231 of SEQ ID NO: 2, 4, 172, 376, 508, 524, 584, 610, 674, 816, 874, 1032, 1388, 1708, 1952, 1980, 2072, 2138, 2294, 2368, 2602, 2832, 2994, or 3104, or relative to a reference sequence corresponding to SEQ ID NO: 2, 4, 172, 376, 508, 524, 584, 610, 674, 816, 874, 1032, 1388, 1708, 1952, 1980, 2072, 2138, 2294, 2368, 2602, 2832, 2994, or 3104.

[0223] In some embodiments, the engineered adenylate kinase comprises an amino acid sequence having at least 70%, 75%, 80%, 81%, 82%, 83%, 84%, 85%, 86%, 87%, 88%, 89%, 90%, 91%, 92%, 93%, 94%, 95%, 96%, 97%, 98%, 99%, or more sequence identity to a reference sequence corresponding to amino acid residues 12-231 of SEQ ID NO: 2, 4, 172, 376, 508, 524, 584, 610, 674, 816, 874, 1032, 1388, 1708, 1952, 1980, 2072, 2138, 2294, 2368, 2602, 2832, 2994, or 3104, or to a reference sequence corresponding to SEQ ID NO: 2, 4, 172, 376, 508, 524, 584, 610, 674, 816, 874, 1032, 1388, 1708, 1952, 1980, 2072, 2138, 2294, 2368, 2602, 2832, 2994, or 3104, wherein the amino acid sequence comprises one or more substitutions relative to the reference sequence corresponding to amino acid residues 12-231 of SEQ ID NO: 2, 4, 172, 376, 508, 524, 584, 610, 674, 816, 874, 1032, 1388, 1708, 1952, 1980, 2072, 2138, 2294, 2368, 2602, 2832, 2994, or 3104, or relative to the reference sequence corresponding to SEQ ID NO: 2, 4, 172, 376, 508, 524, 584, 610, 674, 816, 874, 1032, 1388, 1708, 1952, 1980, 2072, 2138, 2294, 2368, 2602, 2832, 2994, or 3104.

[0224] In some embodiments, the engineered adenylate kinase comprises an amino acid sequence having at least 70%, 75%, 80%, 81%, 82%, 83%, 84%, 85%, 86%, 87%, 88%, 89%, 90%, 91%, 92%, 93%, 94%, 95%, 96%, 97%, 98%, 99%, or more sequence identity to the reference sequence corresponding to amino acid residues 12-231 of SEQ ID NO: 2, or to the reference sequence corresponding to SEQ ID NO: 2, wherein the amino acid sequence comprises one or more substitutions relative to the reference sequence corresponding to amino acid residues 12-231 of SEQ ID NO: 2, or relative to the reference sequence corresponding to SEQ ID NO: 2.

[0225] In some embodiments, the engineered adenylate kinase comprises an amino acid sequence having at least 70%, 75%, 80%, 81%, 82%, 83%, 84%, 85%, 86%, 87%, 88%, 89%, 90%, 91%, 92%, 93%, 94%, 95%, 96%, 97%, 98%, 99%, or more sequence identity to the reference sequence corresponding to amino acid residues 12-231 of SEQ ID NO: 4, 172, 376, 508, 524, 584, 610, 674, 816, 874, 1032, 1388, 1708, 1952, 1980, 2072, 2138, 2294, 2368, 2602, 2832, 2994, or 3104, or to the reference sequence corresponding to SEQ ID NO: 4, 172, 376, 508, 524, 584, 610, 674, 816, 874, 1032, 1388, 1708, 1952, 1980, 2072, 2138, 2294, 2368, 2602, 2832, 2994, or 3104, wherein the amino acid sequence comprises one or more substitutions relative to the reference sequence corresponding to amino acid residues 12-231 of SEQ ID NO: 2, or relative to the reference sequence corresponding to SEQ ID NO: 2.

[0226] In some embodiments, the engineered adenylate kinase comprises an amino acid sequence having at least 70%, 75%, 80%, 81%, 82%, 83%, 84%, 85%, 86%, 87%, 88%, 89%, 90%, 91%, 92%, 93%, 94%, 95%, 96%, 97%, 98%, 99%, or more sequence identity to a reference sequence corresponding to amino acid residues 12-231 of an even-numbered SEQ ID NO. of SEQ ID NOs: 4-1302, 1356-2652, and 2676-3192, or to a reference sequence corresponding to an even-numbered SEQ ID NO. of SEQ ID NOs: 4-1302, 1356-2652, and 2676-3192, wherein the amino acid sequence comprises one or more substitutions relative to the reference sequence corresponding to amino acid residues 12-231 of SEQ ID NO: 2, or relative to the reference sequence corresponding to SEQ ID NO: 2.

[0227] In some embodiments, the amino acid sequence of the engineered adenylate kinase comprises at least a substitution at amino acid position 11, 13, 14, 15, 16, 18, 20, 21, 22, 26, 27, 29, 30, 31, 32, 34, 35, 36, 37, 38, 39, 40, 42, 43, 44, 46, 48, 50, 51, 52, 53, 54, 55, 56, 57, 58, 59, 60, 61, 62, 63, 64, 65, 66, 67, 68, 69, 70, 71, 73, 74, 75, 76, 77, 78, 79, 80, 81, 82, 83, 84, 87, 88, 89, 90, 91, 92, 93, 94, 97, 98, 99, 100, 101, 102, 104, 105, 108, 109, 110, 111, 112, 113, 115, 116, 117, 118, 119, 120, 122, 123, 124, 125, 126, 127, 128, 129, 131, 132, 133, 134, 135, 136, 137, 138, 139, 140, 141, 142, 143, 146, 148, 149, 150, 151, 152, 153, 154, 155, 156, 157, 161, 162, 163, 166, 168, 169, 170, 172, 173, 175, 178, 179, 180, 181, 182, 183, 184, 186, 187, 188, 190, 191, 192, 194, 195, 196, 197, 198, 199, 200, 201, 202, 203, 204, 205, 206, 207, 208, 210, 211, 212, 213, 214, 215, 216, 217, 218, 219, 220, 221, 222, 223, 224, 225, 226, 227, 228, 229, 230, or 231, or combinations thereof, wherein the amino acid positions are relative to the reference sequence corresponding to amino acid residues 12-231 of SEQ ID NO: 2, or relative to the reference sequence corresponding to SEQ ID NO: 2.

[0228] In some embodiments, the amino acid sequence of the engineered adenylate kinase comprises at least a substitution, or amino acid residue 11D, 13G/S, 14C/E, 15F, 16M, 18C/E/L, 20A/P/R/T/V, 21L/N/R/S/T/V, 22A/S, 26L, 27C/S, 29Q/R, 30G/L/S/Y, 31R, 32F/I/L/N, 34A/E/S/V, 35A/E/F/L/S, 36A/E/I/L/M/Q/R/S/V/Y, 37F/G/I/L/R/Y, 38C/F/L/R, 39A/M/Q/T, 40C/F/L/S/T, 42T, 43A/C/G/H/N, 44S, 46E/F/L/M/Y, 48F/L, 50A/C/L/N/Q/R/S/V, 51F/G/K/L/M/R/T, 52A/H, 53A/M/S, 54G/H/I/M/Q/R/T, 55G/L/Q/S, 56E/Q/T, 57H/L/P/S, 58C/G/Y, 59E/G/H/M/P/R/T/V/W/Y, 60A/C/P/S/W, 61A/E/N/P/S/V, 62A/E/G/I/L/S, 63S, 64R, 65A/D/F/K/P/T, 66A/C/D/E/F/G/H/N/P/Q/R/S/T/V/W, 67R, 68A/D/E/G/I/L/Q/R/S/T/V/W/Y, 69F/L/Q/R/Y, 70R, 71T, 73I/R, 74C/G/Q/S, 75L, 76G/L/P, 77A/I/M/Q/S, 78C/G/N/T, 79A/K/L/P/W, 80A/D/G/L/N/P/R/S/V/W, 81F/I/L/Q/S, 82I/L/P/Q/T, 83G/H/L/S/T, 84A/E/H/M/S, 87A/E/I/K/L/M/R/V/Y, 88N/R/T, 89A/H/I/L/P/Q/T/V, 90C/E/F/K/S/T/V, 91A/F/G/L/S/V, 92L/S, 93A/E/G/P/S/T/V/Y, 94A/C/F/M/Q/S/T/V/Y, 97I, 98A/G/Q, 99A/C, 100F/S/V, 101-, 102A/C/N, 104A/F/H/I/L/Q/R/S/W, 105G/K/L/M/R/S, 108M/R/S/V, 109E/Y, 110C/F, 111E/P/R, 112A/C/E/K/M/N/Q/R/T, 113E/W/Y, 115G/K/R, 116A/E/F/L, 117L/N/S, 118A/G/L/R/S, 119F/K/L/P/R/S, 120G/K/L/R/S/T, 122A/H/S, 123S, 124V, 125I, 126A/E/S/V, 127I/L/P/S, 128C/E/I/K/N/R/S, 129I/L/P/S, 131A/G/V, 132G/K/L/T/V, 133A/E/F/L/Q/S/V/W, 134L, 135I/K/M/P/R/S, 136A/I/L/S/V/Y, 137L, 138C/I/M/V, 139A/H/L/R, 140G, 141G/V, 142F/L/M/W, 143A/C/G/P/R/S/T/V, 146D/H/N/R/V, 148F/H/M/P/Q/R/S/T, 149L, 150C/G/L/P/S/V, 151A/F/R/Y, 152F/H, 153C/K/S/V, 154Q/R, 155A/F/T/W, 156A/C/N/T/V, 157P/V, 161G/L, 162G, 163G/Q/S, 166C/F/L/P/S, 168G/L/N/Q/S, 169A/D/I/Y, 170A/G/H/P/R/S, 172A/H/M/S/T, 173F/K/R/S/T/V, 175F/L/S, 178E/G/N/R, 179A/C/G/I/L/P/V, 180G/H/P, 181C/I/V, 182A/G/I/L/Q/S, 183A/L/Q, 184I/K/M/N/R/S/T/V, 186L, 187G/Y, 188G/L, 190A/C/E/G/H/N/Q/R, 191D/K, 192A/H/I/W, 194F/L/R/V/Y, 195G/I/M/R, 196I, 197A/L/Q/V, 198G, 199R, 200A, 201A/F/K/L/S, 202E/G/M/S, 203A/E/L/R, 204R/S, 205L/P, 206W, 207A/L/T, 208E, 210V, 211A, 212C/H/I/L/M/N/P/Q/R/S/W, 213L/P/Q/S, 214A/E/L/M/P/R/T/W, 215A/P/V, 216A/D/E/G/H/L/M/N/P/R/S/T/V, 217E/G/H/P/T, 218A/I/L, 219A/F/G/L/P/S/T/W, 220E/V, 221D, 222I/T, 223T, 224G/S/T, 225A/L/Q/R/T/V, 226K/L/P/R/S/T, 227P, 228D/F/G/I/L/P/Q/R/S/T/V, 229C/I, 230A/M/P/Q, or 231A/Q/R/T, or combinations thereof, wherein the amino acid positions are relative to the reference sequence corresponding to amino acid residues 12-231 of SEQ ID NO: 2, or relative to the reference sequence corresponding to SEQ ID NO: 2.

[0229] In some embodiments, the amino acid sequence of the engineered adenylate kinase comprises at least a substitution G11D, M13G/S, A14C/E, Yl5F, L16M, F18C/E/L, G20A/P/R/T/V, P21L/N/R/S/T/V, P22A/S, K26L, G27C/S, Y29Q/R, A30G/L/S/Y, K31R, I32F/I/L/N, Q34A/E/S/V, E35A/F/L/S, K36A/E/I/L/M/Q/R/S/V/Y, T37F/G/I/L/R/Y, G38C/F/L/R, I39A/M/Q/T, P40C/F/L/S/T, I42T, S43A/C/G/H/N, T44S, D46E/F/L/M/Y, F48L, D50A/C/L/N/Q/R/S/V, I51F/G/K/L/M/R/T, V52A/H, K53A/M/S, K54G/H/I/M/Q/R/T, E55G/L/Q/S, N56E/Q/T, D57H/L/P/S, E58C/G/Y, L59E/G/H/M/P/R/T/V/W/Y, G60A/C/P/S/W, K61A/E/N/P/S/V, K62A/E/G/I/L/S, I63S, K64R, E65A/D/F/K/P/T, I66A/C/D/E/F/G/H/N/P/Q/R/S/T/V/W, M67R, E68A/D/G/I/L/Q/R/S/T/V/W/Y, K69F/L/Q/R/Y, G70R, E71T, V731/R, P74C/G/Q/S, D75L, E76G/L/P, L77A/I/M/Q/S, V78C/G/N/T, N79A/K/L/P/W, E80A/D/G/L/N/P/R/S/V/W, V81F/I/L/Q/S, V82I/L/P/Q/T, K83G/H/L/S/T, R84A/E/H/M/S, S87A/E/I/K/L/M/R/V/Y, E88N/R/T, K89A/H/I/L/P/Q/T/V, D90C/E/F/K/S/T/V, C91A/F/G/L/S/V, E92L/S, K93A/E/G/P/S/T/V/Y, G94A/C/F/M/Q/S/T/V/Y, L97I, D98A/G/Q, G99A/C, Y100F/S/V, P101-, R102A/C/N, V104A/F/H/I/L/Q/R/S/W, A105G/K/L/M/R/S, E108M/R/S/V, F109E/Y, L110C/F, D111E/P/R, S112A/C/E/K/M/N/Q/R/T, F113E/W/Y, E115G/K/R, S116A/E/F/L, Q117L/N/S, N118A/G/L/R/S, K119F/K/L/P/R/S, Q120G/K/L/R/S/T, T122A/H/S, A123S, A124V, V125I, L126A/E/S/V, F127I/L/P/S, D128C/E/I/K/N/R/S, V129I/L/P/S, E131A/G/V, D132G/K/L/T/V, V133A/E/F/L/Q/S/W, V134L, V135I/K/M/P/R/S, Q136A/I/L/S/V/Y, R137L, L138C/I/M/V, T139A/H/L/R, S140G, R141G/V, R142F/L/M/W, I143A/C/G/P/R/S/T/V, K146D/H/N/R/V, G148F/H/M/P/Q/R/S/T, R149L, I150C/G/L/P/SN, Y151A/F/R, N152F/H, M153C/K/S/V, 1154Q/R, S155A/F/T/W, L156A/C/N/T/V, P157V, D161G/L, E162G, L163G/Q/S, D166C/F/L/P/S, K168G/L/N/Q/S, V169A/D/I/Y, K170A/G/H/P/R/S, V172A/H/M/S/T, Q173F/K/R/S/T/V, D175F/L/S, K178E/G/N/R, E179A/C/G/I/L/P/V, E180G/H/P, T181C/I/V, V182A/G/I/L/Q/S, R183A/L/Q, H184I/K/M/N/R/S/T/V, Y186L, K187G/Y, V188G/L, L190A/C/E/G/H/N/Q/R, E191D/K, K192A/H/I/W, Q194F/L/R/V/Y, P195G/I/M/R, V196I, I197A/L/Q/V, D198G, Y199R, Y200A, G201A/F/K/L/S, K202E/G/M/S, K203A/E/L/R, G204R/S, 1205L/P, L206W, K207A/L/T, R208E, D210V, G211A, T212C/H/I/L/M/N/P/Q/R/S/W, I213L/P/Q/S, G214A/E/L/M/P/R/T/W, I215A/P/V, D216A/D/E/G/H/L/M/N/P/R/S/T/V, N217E/G/H/P/T, V218A/I/L, V219A/F/G/L/P/S/T/W, A220E/V, E221D, V222I/T, L223T, K224G/S/T, I225A/L/Q/R/T/V, I226K/L/P/R/S/T, G227P, W228D/F/G/I/L/P/Q/R/S/T/V, S229C/I, D230A/M/P/Q, or K231A/Q/R/T, or combinations thereof, wherein the amino acid positions are relative to the reference sequence corresponding to amino acid residues 12-231 of SEQ ID NO: 2, or relative to the reference sequence corresponding to SEQ ID NO: 2.

[0230] In some embodiments, the amino acid sequence of the engineered adenylate kinase comprises at least a substitution at amino acid position 13, 18, 29, 30, 31, 32, 34, 35, 48, 50, 53, 55, 59, 60, 61, 62, 66, 68, 77, 78, 80, 83, 87, 100, 104, 105, 109, 118, 119, 127, 128, 133, 136, 139, 142, 143, 150, 151, 155, 157, 168, 170, 175, 184, 186, 190, 201, 207, 212, 213, 214, 216, 217, 218, 224, or 226, or combinations thereof, wherein the amino acid positions are relative to the reference sequence corresponding to amino acid residues 12-231 of SEQ ID NO: 2, or relative to the reference sequence corresponding to SEQ ID NO: 2.

[0231] In some embodiments, the amino acid sequence of the engineered adenylate kinase comprises at least a substitution or amino acid residue 13G/S, 18C/E/L, 29R/Q, 30G/L/S/Y, 31R, 32F/I/L/N, 34A/E/S/V, 35A/E/F/L/S, 48F, 50A/C/L/N/Q/R/S/V, 53A/M/S, 55G/L/Q/S, 59E/G/H/L/M/P/R/T/V/W/Y, 60A/C/P/S/W, 61A/E/N/P/S/V, 62A/E/G/I/L/S, 66A/C/D/E/F/G/H/N/P/Q/R/S/T/V/W, 68A/D/E/G/I/L/Q/R/S/T/V/W/Y, 77A/I/M/Q/S, 78C/G/N/T, 80A/D/G/L/N/P/R/S/V/W, 83G/H/L/S/T, 87A/E/I/K/L/M/R/V/Y, 100F/S/V, 104A/F/H/I/L/Q/R/S/W, 105G/K/L/M/R/S, 109E/Y, 118A/G/L/R/S, 119F/K/L/P/R/S, 127I/L/P/S, 128C/E/I/K/N/R/S, 133A/E/F/L/Q/S/V/W, 136A/I/L/S/V/Y, 139A/H/L/R, 142F/L/M/W, 143A/C/G/P/R/S/T/V, 150C/G/L/P/S/V, 151A/F/R/Y, 155A/F/T/W, 157P/V, 168G/L/N/Q/S, 170A/G/H/P/R/S, 175F/L/S, 184I/K/M/N/R/S/T/V, 186L, 190A/C/E/G/H/N/Q/R, 201A/F/K/L/S, 207A/L/T, 212C/H/I/L/M/N/P/Q/R/S/W, 213L/P/Q/S, 214A/E/L/M/P/R/T/W, 216A/E/G/H/L/M/N/P/R/S/T/V/W, 217E/G/H/P/T, 218A/I/L, 224G/S/T, or 226K/L/P/R/S/T, or combinations thereof, wherein the amino acid positions are relative to the reference sequence corresponding to amino acid residues 12-231 of SEQ ID NO: 2, or relative to the reference sequence corresponding to SEQ ID NO: 2.

[0232] In some embodiments, the amino acid sequence of the engineered adenylate kinase comprises at least a substitution or amino acid residue 13G, 18L, 29Q, 30G/S, 31R, 32I, 34S, 35A, 48L, 50Q, 53A, 55Q, 59V, 60A, 61S, 62S, 66W, 68L, 77I, 78G, 80A/P, 83L, 87K, 100F, 104A, 105R, 109Y, 118G, 119R, 127I/L, 128E/K, 133E, 136A/V, 139L, 142L/R, 143V, 150S, 151F, 155F, 157V, 168G, 170G/S, 175F/L, 184M, 186L, 190Q/R, 201A/S, 207A, 212S, 213Q, 214E, 216E/M/P/R, 217P, 218I, 224G, or 226L, or combinations thereof, wherein the amino acid positions are relative to the reference sequence corresponding to amino acid residues 12-231 of SEQ ID NO: 2, or relative to the reference sequence corresponding to SEQ ID NO: 2.

[0233] In some embodiments, the amino acid sequence of the engineered adenylate kinase comprises at least a substitution M13G, F18L, Y29Q, A30G/S, K31R, R32I, Q34S, E35A, F48L, D50Q, K53A, E55Q, L59V, G60A, K61S, K62S, I66W, E68L, L77I, V78G, E80A/P, K83L, S87K, Y100F, V104A, A105R, F109Y, N118G, K119R, F127I/L, D128E/K, V133E, Q136A/V, T139L, R142L/R, I143V, I150S, Y151F, S155F, P157V, K168G, K170G/S, D175F/L, H184M, Y186L, L190Q/R, G201A/S, K207A, T212S, I213Q, G214E, D216E/M/P/R, N217P, V218I, K224G, or I226L, or combinations thereof, wherein the amino acid positions are relative to the reference sequence corresponding to amino acid residues 12-231 of SEQ ID NO: 2, or relative to the reference sequence corresponding to SEQ ID NO: 2.

[0234] In some embodiments, the amino acid sequence of the engineered adenylate kinase comprises at least a substitution at amino acid position 29, 30, 128, 142, 186, 212, or 213, or combinations thereof, wherein the amino acid positions are relative to the reference sequence corresponding to amino acid residues 12-231 of SEQ ID NO: 2, or relative to the reference sequence corresponding to SEQ ID NO: 2. In some embodiments, the amino acid sequence of the engineered adenylate kinase comprises at least a substitution, or amino acid residue 29Q, 30S, 128K, 142L, 186L, 212S, or 213Q, or combinations thereof, wherein the amino acid positions are relative to the reference sequence corresponding to amino acid residues 12-231 of SEQ ID NO: 2, or relative to the reference sequence corresponding to SEQ ID NO: 2. In some embodiments, the amino acid sequence of the engineered adenylate kinase comprises at least a substitution Y29Q, A30S, D128K, R142L, Y186L, T212S, or I213Q, or combinations thereof, wherein the amino acid positions are relative to the reference sequence corresponding to amino acid residues 12-231 of SEQ ID NO: 2, or relative to the reference sequence corresponding to SEQ ID NO: 2.

[0235] In some embodiments, the amino acid sequence of the engineered adenylate kinase comprises at least a substitution set at amino acid positions 29/30/128/142/186/212/213, wherein the amino acid positions are relative to the reference sequence corresponding to amino acid residues 12-231 of SEQ ID NO: 2, or relative to the reference sequence corresponding to SEQ ID NO: 2. In some embodiments, the amino acid sequence of the engineered adenylate kinase comprises at least a substitution set, or amino acid residues 29Q/30S/128K/142L/186L/212S/213Q, wherein the amino acid positions are relative to the reference sequence corresponding to amino acid residues 12-231 of SEQ ID NO: 2, or relative to the reference sequence corresponding to SEQ ID NO: 2. In some embodiments, the amino acid sequence of the engineered adenylate kinase comprises at least a substitution set Y29Q/A30S/D128K/R142L/Y186L/T212S/I213Q, wherein the amino acid positions are relative to the reference sequence corresponding to amino acid residues 12-231 of SEQ ID NO: 2, or relative to the reference sequence corresponding to SEQ ID NO: 2.

[0236] In some embodiments, the amino acid sequence of the engineered adenylate kinase comprises at least a substitution at amino acid position 155 or 226, or combination thereof, wherein the amino acid positions are relative to the reference sequence corresponding to amino acid residues 12-231 of SEQ ID NO: 2, or relative to the reference sequence corresponding to SEQ ID NO: 2. In some embodiments, the amino acid sequence of the engineered adenylate kinase comprises at least a substitution or amino acid residue 155F or 226L, or combination thereof, wherein the amino acid positions are relative to the reference sequence corresponding to amino acid residues 12-231 of SEQ ID NO: 2, or relative to the reference sequence corresponding to SEQ ID NO: 2. In some embodiments, the amino acid sequence of the engineered adenylate kinase comprises at least a substitution S155F or I226L, or combination thereof, wherein the amino acid positions are relative to the reference sequence corresponding to amino acid residues 12-231 of SEQ ID NO: 2, or relative to the reference sequence corresponding to SEQ ID NO: 2.

[0237] In some embodiments, the amino acid sequence of the engineered adenylate kinase comprises at least a substitution set at amino acid positions 155/226, wherein the amino acid positions are relative to the reference sequence corresponding to amino acid residues 12-231 of SEQ ID NO: 2, or relative to the reference sequence corresponding to SEQ ID NO: 2. In some embodiments, the amino acid sequence of the engineered adenylate kinase comprises at least a substitution set, or amino acid residues 155F/226L, wherein the amino acid positions are relative to the reference sequence corresponding to amino acid residues 12-231 of SEQ ID NO: 2, or relative to the reference sequence corresponding to SEQ ID NO: 2. In some embodiments, the amino acid sequence of the engineered adenylate kinase comprises at least a substitution set S155F/I226L, wherein the amino acid positions are relative to the reference sequence corresponding to amino acid residues 12-231 of SEQ ID NO: 2, or relative to the reference sequence corresponding to SEQ ID NO: 2.

[0238] In some embodiments, the amino acid sequence of the engineered adenylate kinase comprises at least a substitution at amino acid position 78, 80, or 224, or combinations thereof, wherein the amino acid positions are relative to the reference sequence corresponding to amino acid residues 12-231 of SEQ ID NO: 2, or relative to the reference sequence corresponding to SEQ ID NO: 2. In some embodiments, the amino acid sequence of the engineered adenylate kinase comprises at least a substitution or amino acid residue 78G, 80A, or 224G, or combinations thereof, wherein the amino acid positions are relative to the reference sequence corresponding to amino acid residues 12-231 of SEQ ID NO: 2, or relative to the reference sequence corresponding to SEQ ID NO: 2. In some embodiments, the amino acid sequence of the engineered adenylate kinase comprises at least a substitution V78G, E80A, or K224G, or combinations thereof, wherein the amino acid positions are relative to the reference sequence corresponding to amino acid residues 12-231 of SEQ ID NO: 2, or relative to the reference sequence corresponding to SEQ ID NO: 2.

[0239] In some embodiments, the amino acid sequence of the engineered adenylate kinase comprises at least a substitution set at amino acid positions 78/80/224, wherein the amino acid positions are relative to the reference sequence corresponding to amino acid residues 12-231 of SEQ ID NO: 2, or relative to the reference sequence corresponding to SEQ ID NO: 2. In some embodiments, the amino acid sequence of the engineered adenylate kinase comprises at least a substitution set, or amino acid residues 78G/80A/224G, wherein the amino acid positions are relative to the reference sequence corresponding to amino acid residues 12-231 of SEQ ID NO: 2, or relative to the reference sequence corresponding to SEQ ID NO: 2. In some embodiments, the amino acid sequence of the engineered adenylate kinase comprises at least a substitution set V78G/E80A/K224G, wherein the amino acid positions are relative to the reference sequence corresponding to amino acid residues 12-231 of SEQ ID NO: 2, or relative to the reference sequence corresponding to SEQ ID NO: 2.

[0240] In some embodiments, the amino acid sequence of the engineered adenylate kinase comprises at least a substitution at amino acid position 60 or 170, or combinations thereof, wherein the amino acid positions are relative to the reference sequence corresponding to amino acid residues 12-231 of SEQ ID NO: 2, or relative to the reference sequence corresponding to SEQ ID NO: 2. In some embodiments, the amino acid sequence of the engineered adenylate kinase comprises at least a substitution, or amino acid residue 60A or 170G, or combination thereof, wherein the amino acid positions are relative to the reference sequence corresponding to amino acid residues 12-231 of SEQ ID NO: 2, or relative to the reference sequence corresponding to SEQ ID NO: 2. In some embodiments, the amino acid sequence of the engineered adenylate kinase comprises at least a substitution G60A or K170G, or combination thereof, wherein the amino acid positions are relative to the reference sequence corresponding to amino acid residues 12-231 of SEQ ID NO: 2, or relative to the reference sequence corresponding to SEQ ID NO: 2.

[0241] In some embodiments, the amino acid sequence of the engineered adenylate kinase comprises at least a substitution set at amino acid positions 60/170, wherein the amino acid positions are relative to the reference sequence corresponding to amino acid residues 12-231 of SEQ ID NO: 2, or relative to the reference sequence corresponding to SEQ ID NO: 2. In some embodiments, the amino acid sequence of the engineered adenylate kinase comprises at least a substitution set, or amino acid residues 60A/170G, wherein the amino acid positions are relative to the reference sequence corresponding to amino acid residues 12-231 of SEQ ID NO: 2, or relative to the reference sequence corresponding to SEQ ID NO: 2. In some embodiments, the amino acid sequence of the engineered adenylate kinase comprises at least a substitution set G60A/K170G, wherein the amino acid positions are relative to the reference sequence corresponding to amino acid residues 12-231 of SEQ ID NO: 2, or relative to the reference sequence corresponding to SEQ ID NO: 2.

[0242] In some embodiments, the amino acid sequence of the engineered adenylate kinase comprises at least a substitution at amino acid position 55 or 133, or combination thereof, wherein the amino acid positions are relative to the reference sequence corresponding to amino acid residues 12-231 of SEQ ID NO: 2, or relative to the reference sequence corresponding to SEQ ID NO: 2. In some embodiments, the amino acid sequence of the engineered adenylate kinase comprises at least a substitution, or amino acid residue 55Q or 133E, or combination thereof, wherein the amino acid positions are relative to the reference sequence corresponding to amino acid residues 12-231 of SEQ ID NO: 2, or relative to the reference sequence corresponding to SEQ ID NO: 2. In some embodiments, the amino acid sequence of the engineered adenylate kinase comprises at least a substitution E55Q or V133E, or combination thereof, wherein the amino acid positions are relative to the reference sequence corresponding to amino acid residues 12-231 of SEQ ID NO: 2, or relative to the reference sequence corresponding to SEQ ID NO: 2.

[0243] In some embodiments, the amino acid sequence of the engineered adenylate kinase comprises at least a substitution set at amino acid positions 55/133, wherein the amino acid positions are relative to the reference sequence corresponding to amino acid residues 12-231 of SEQ ID NO: 2, or relative to the reference sequence corresponding to SEQ ID NO: 2. In some embodiments, the amino acid sequence of the engineered adenylate kinase comprises at least a substitution set, or amino acid residues 55Q/133E, wherein the amino acid positions are relative to the reference sequence corresponding to amino acid residues 12-231 of SEQ ID NO: 2, or relative to the reference sequence corresponding to SEQ ID NO: 2. In some embodiments, the amino acid sequence of the engineered adenylate kinase comprises at least a substitution set E55Q/V133E, wherein the amino acid positions are relative to the reference sequence corresponding to amino acid residues 12-231 of SEQ ID NO: 2, or relative to the reference sequence corresponding to SEQ ID NO: 2.

[0244] In some embodiments, the amino acid sequence of the engineered adenylate kinase comprises at least a substitution at amino acid position 61 or 201, or combination thereof, wherein the amino acid positions are relative to the reference sequence corresponding to amino acid residues 12-231 of SEQ ID NO: 2, or relative to the reference sequence corresponding to SEQ ID NO: 2. In some embodiments, the amino acid sequence of the engineered adenylate kinase comprises at least a substitution, or amino acid residue 61S or 201S, or combination thereof, wherein the amino acid positions are relative to the reference sequence corresponding to amino acid residues 12-231 of SEQ ID NO: 2, or relative to the reference sequence corresponding to SEQ ID NO: 2. In some embodiments, the amino acid sequence of the engineered adenylate kinase comprises at least a substitution K61S or G201S, or combination thereof, wherein the amino acid positions are relative to the reference sequence corresponding to amino acid residues 12-231 of SEQ ID NO: 2, or relative to the reference sequence corresponding to SEQ ID NO: 2.

[0245] In some embodiments, the amino acid sequence of the engineered adenylate kinase comprises at least a substitution set at amino acid positions 61/201, wherein the amino acid positions are relative to the reference sequence corresponding to amino acid residues 12-231 of SEQ ID NO: 2, or relative to the reference sequence corresponding to SEQ ID NO: 2. In some embodiments, the amino acid sequence of the engineered adenylate kinase comprises at least a substitution set, or amino acid residues 61S/201S, wherein the amino acid positions are relative to the reference sequence corresponding to amino acid residues 12-231 of SEQ ID NO: 2, or relative to the reference sequence corresponding to SEQ ID NO: 2. In some embodiments, the amino acid sequence of the engineered adenylate kinase comprises at least a substitution set K61S/G201S, wherein the amino acid positions are relative to the reference sequence corresponding to amino acid residues 12-231 of SEQ ID NO: 2, or relative to the reference sequence corresponding to SEQ ID NO: 2.

[0246] In some embodiments, the amino acid sequence of the engineered adenylate kinase comprises at least a substitution at amino acid position 13, 30, 31, 53, 109, 119, or 168, or combinations thereof, wherein the amino acid positions are relative to the reference sequence corresponding to amino acid residues 12-231 of SEQ ID NO: 2, or relative to the reference sequence corresponding to SEQ ID NO: 2. In some embodiments, the amino acid sequence of the engineered adenylate kinase comprises at least a substitution, or amino acid residue 13G, 30G, 31R, 53A, 109Y, 119R, or 168G, or combinations thereof, wherein the amino acid positions are relative to the reference sequence corresponding to amino acid residues 12-231 of SEQ ID NO: 2, or relative to the reference sequence corresponding to SEQ ID NO: 2. In some embodiments, the amino acid sequence of the engineered adenylate kinase comprises at least a substitution M13G, S30G, K31R, K53A, F109Y, K119R, or K168G, or combinations thereof, wherein the amino acid positions are relative to the reference sequence corresponding to amino acid residues 12-231 of SEQ ID NO: 2, or relative to the reference sequence corresponding to SEQ ID NO: 2.

[0247] In some embodiments, the amino acid sequence of the engineered adenylate kinase comprises at least a substitution set at amino acid positions 13/30/31/53/109/119/168, wherein the amino acid positions are relative to the reference sequence corresponding to amino acid residues 12-231 of SEQ ID NO: 2, or relative to the reference sequence corresponding to SEQ ID NO: 2. In some embodiments, the amino acid sequence of the engineered adenylate kinase comprises at least a substitution set, or amino acid residues 13G/30G/31R/53A/109Y/119R/168G, wherein the amino acid positions are relative to the reference sequence corresponding to amino acid residues 12-231 of SEQ ID NO: 2, or relative to the reference sequence corresponding to SEQ ID NO: 2. In some embodiments, the amino acid sequence of the engineered adenylate kinase comprises at least a substitution set M13G/S30G/K31R/K53A/F109Y/K119R/K168G, wherein the amino acid positions are relative to the reference sequence corresponding to amino acid residues 12-231 of SEQ ID NO: 2, or relative to the reference sequence corresponding to SEQ ID NO: 2.

[0248] In some embodiments, the amino acid sequence of the engineered adenylate kinase comprises at least a substitution at amino acid position 34, 35, or 105, or combinations thereof, wherein the amino acid positions are relative to the reference sequence corresponding to amino acid residues 12-231 of SEQ ID NO: 2, or relative to the reference sequence corresponding to SEQ ID NO: 2. In some embodiments, the amino acid sequence of the engineered adenylate kinase comprises at least a substitution or amino acid residue 34S, 35A, or 105R, or combinations thereof, wherein the amino acid positions are relative to the reference sequence corresponding to amino acid residues 12-231 of SEQ ID NO: 2, or relative to the reference sequence corresponding to SEQ ID NO: 2. In some embodiments, the amino acid sequence of the engineered adenylate kinase comprises at least a substitution Q34S, E35A, or A105R, or combinations thereof, wherein the amino acid positions are relative to the reference sequence corresponding to amino acid residues 12-231 of SEQ ID NO: 2, or relative to the reference sequence corresponding to SEQ ID NO: 2.

[0249] In some embodiments, the amino acid sequence of the engineered adenylate kinase comprises at least a substitution set at amino acid positions 34/35/105, wherein the amino acid positions are relative to the reference sequence corresponding to amino acid residues 12-231 of SEQ ID NO: 2, or relative to the reference sequence corresponding to SEQ ID NO: 2. In some embodiments, the amino acid sequence of the engineered adenylate kinase comprises at least a substitution set, or amino acid residues 34S/35A/105R, wherein the amino acid positions are relative to the reference sequence corresponding to amino acid residues 12-231 of SEQ ID NO: 2, or relative to the reference sequence corresponding to SEQ ID NO: 2. In some embodiments, the amino acid sequence of the engineered adenylate kinase comprises at least a substitution set Q34S/E35A/A105R, wherein the amino acid positions are relative to the reference sequence corresponding to amino acid residues 12-231 of SEQ ID NO: 2, or relative to the reference sequence corresponding to SEQ ID NO: 2.

[0250] In some embodiments, the amino acid sequence of the engineered adenylate kinase comprises at least a substitution at amino acid position 59 or 139, or combination thereof, wherein the amino acid positions are relative to the reference sequence corresponding to amino acid residues 12-231 of SEQ ID NO: 2, or relative to the reference sequence corresponding to SEQ ID NO: 2. In some embodiments, the amino acid sequence of the engineered adenylate kinase comprises at least a substitution or amino acid residue 59V or 139L, or combination thereof, wherein the amino acid positions are relative to the reference sequence corresponding to amino acid residues 12-231 of SEQ ID NO: 2, or relative to the reference sequence corresponding to SEQ ID NO: 2. In some embodiments, the amino acid sequence of the engineered adenylate kinase comprises at least a substitution L59V or T139L, or combination thereof, wherein the amino acid positions are relative to the reference sequence corresponding to amino acid residues 12-231 of SEQ ID NO: 2, or relative to the reference sequence corresponding to SEQ ID NO: 2.

[0251] In some embodiments, the amino acid sequence of the engineered adenylate kinase comprises at least a substitution set at amino acid positions 59/139, wherein the amino acid positions are relative to the reference sequence corresponding to amino acid residues 12-231 of SEQ ID NO: 2, or relative to the reference sequence corresponding to SEQ ID NO: 2. In some embodiments, the amino acid sequence of the engineered adenylate kinase comprises at least a substitution set, or amino acid residues 59V/139L, wherein the amino acid positions are relative to the reference sequence corresponding to amino acid residues 12-231 of SEQ ID NO: 2, or relative to the reference sequence corresponding to SEQ ID NO: 2. In some embodiments, the amino acid sequence of the engineered adenylate kinase comprises at least a substitution set L59V/T139L, wherein the amino acid positions are relative to the reference sequence corresponding to amino acid residues 12-231 of SEQ ID NO: 2, or relative to the reference sequence corresponding to SEQ ID NO: 2.

[0252] In some embodiments, the amino acid sequence of the engineered adenylate kinase comprises at least a substitution at amino acid position 48 or 100, or combination thereof, wherein the amino acid positions are relative to the reference sequence corresponding to amino acid residues 12-231 of SEQ ID NO: 2, or relative to the reference sequence corresponding to SEQ ID NO: 2. In some embodiments, the amino acid sequence of the engineered adenylate kinase comprises at least a substitution or amino acid residue 548L or 100F, or combination thereof, wherein the amino acid positions are relative to the reference sequence corresponding to amino acid residues 12-231 of SEQ ID NO: 2, or relative to the reference sequence corresponding to SEQ ID NO: 2. In some embodiments, the amino acid sequence of the engineered adenylate kinase comprises at least a substitution F48L or Y100F, or combination thereof, wherein the amino acid positions are relative to the reference sequence corresponding to amino acid residues 12-231 of SEQ ID NO: 2, or relative to the reference sequence corresponding to SEQ ID NO: 2.

[0253] In some embodiments, the amino acid sequence of the engineered adenylate kinase comprises at least a substitution set at amino acid positions 48/100, wherein the amino acid positions are relative to the reference sequence corresponding to amino acid residues 12-231 of SEQ ID NO: 2, or relative to the reference sequence corresponding to SEQ ID NO: 2. In some embodiments, the amino acid sequence of the engineered adenylate kinase comprises at least a substitution set, or amino acid residues 48L/100F, wherein the amino acid positions are relative to the reference sequence corresponding to amino acid residues 12-231 of SEQ ID NO: 2, or relative to the reference sequence corresponding to SEQ ID NO: 2. In some embodiments, the amino acid sequence of the engineered adenylate kinase comprises at least a substitution set F48L/Y100F, wherein the amino acid positions are relative to the reference sequence corresponding to amino acid residues 12-231 of SEQ ID NO: 2, or relative to the reference sequence corresponding to SEQ ID NO: 2.

[0254] In some embodiments, the amino acid sequence of the engineered adenylate kinase comprises at least a substitution at amino acid position 32, 127, or 175, or combinations thereof, wherein the amino acid positions are relative to the reference sequence corresponding to amino acid residues 12-231 of SEQ ID NO: 2, or relative to the reference sequence corresponding to SEQ ID NO: 2. In some embodiments, the amino acid sequence of the engineered adenylate kinase comprises at least a substitution or amino acid residue 32I, 127I, or 175L, or combinations thereof, wherein the amino acid positions are relative to the reference sequence corresponding to amino acid residues 12-231 of SEQ ID NO: 2, or relative to the reference sequence corresponding to SEQ ID NO: 2. In some embodiments, the amino acid sequence of the engineered adenylate kinase comprises at least a substitution R32I, F127I, or D175L, or combinations thereof, wherein the amino acid positions are relative to the reference sequence corresponding to amino acid residues 12-231 of SEQ ID NO: 2, or relative to the reference sequence corresponding to SEQ ID NO: 2.

[0255] In some embodiments, the amino acid sequence of the engineered adenylate kinase comprises at least a substitution set at amino acid positions 32/127/175, wherein the amino acid positions are relative to the reference sequence corresponding to amino acid residues 12-231 of SEQ ID NO: 2, or relative to the reference sequence corresponding to SEQ ID NO: 2. In some embodiments, the amino acid sequence of the engineered adenylate kinase comprises at least a substitution set, or amino acid residues 32I/127I/175L, wherein the amino acid positions are relative to the reference sequence corresponding to amino acid residues 12-231 of SEQ ID NO: 2, or relative to the reference sequence corresponding to SEQ ID NO: 2. In some embodiments, the amino acid sequence of the engineered adenylate kinase comprises at least a substitution set R32I/F127I/D175L, wherein the amino acid positions are relative to the reference sequence corresponding to amino acid residues 12-231 of SEQ ID NO: 2, or relative to the reference sequence corresponding to SEQ ID NO: 2.

[0256] In some embodiments, the amino acid sequence of the engineered adenylate kinase comprises at least a substitution at amino acid position 62, 128, or 190, or combinations thereof, wherein the amino acid positions are relative to the reference sequence corresponding to amino acid residues 12-231 of SEQ ID NO: 2, or relative to the reference sequence corresponding to SEQ ID NO: 2. In some embodiments, the amino acid sequence of the engineered adenylate kinase comprises at least a substitution or amino acid residue 62S, 128E, or 190R, or combinations thereof, wherein the amino acid positions are relative to the reference sequence corresponding to amino acid residues 12-231 of SEQ ID NO: 2, or relative to the reference sequence corresponding to SEQ ID NO: 2. In some embodiments, the amino acid sequence of the engineered adenylate kinase comprises at least a substitution K62S, K128E, or L190R, or combinations thereof, wherein the amino acid positions are relative to the reference sequence corresponding to amino acid residues 12-231 of SEQ ID NO: 2, or relative to the reference sequence corresponding to SEQ ID NO: 2.

[0257] In some embodiments, the amino acid sequence of the engineered adenylate kinase comprises at least a substitution set at amino acid positions 62/128/190, wherein the amino acid positions are relative to the reference sequence corresponding to amino acid residues 12-231 of SEQ ID NO: 2, or relative to the reference sequence corresponding to SEQ ID NO: 2. In some embodiments, the amino acid sequence of the engineered adenylate kinase comprises at least a substitution set, or amino acid residues 62S/128E/190R, wherein the amino acid positions are relative to the reference sequence corresponding to amino acid residues 12-231 of SEQ ID NO: 2, or relative to the reference sequence corresponding to SEQ ID NO: 2. In some embodiments, the amino acid sequence of the engineered adenylate kinase comprises at least a substitution set K62S/K128E/L190R, wherein the amino acid positions are relative to the reference sequence corresponding to amino acid residues 12-231 of SEQ ID NO: 2, or relative to the reference sequence corresponding to SEQ ID NO: 2.

[0258] In some embodiments, the amino acid sequence of the engineered adenylate kinase comprises at least a substitution at amino acid position 136, 150, or 217, or combinations thereof, wherein the amino acid positions are relative to the reference sequence corresponding to amino acid residues 12-231 of SEQ ID NO: 2, or relative to the reference sequence corresponding to SEQ ID NO: 2. In some embodiments, the amino acid sequence of the engineered adenylate kinase comprises at least a substitution or amino acid residue 136A, 150S, or 217P, or combinations thereof, wherein the amino acid positions are relative to the reference sequence corresponding to amino acid residues 12-231 of SEQ ID NO: 2, or relative to the reference sequence corresponding to SEQ ID NO: 2. In some embodiments, the amino acid sequence of the engineered adenylate kinase comprises at least a substitution Q136A, I150S, or N217P, or combinations thereof, wherein the amino acid positions are relative to the reference sequence corresponding to amino acid residues 12-231 of SEQ ID NO: 2, or relative to the reference sequence corresponding to SEQ ID NO: 2.

[0259] In some embodiments, the amino acid sequence of the engineered adenylate kinase comprises at least a substitution set at amino acid positions 136/150/217, wherein the amino acid positions are relative to the reference sequence corresponding to amino acid residues 12-231 of SEQ ID NO: 2, or relative to the reference sequence corresponding to SEQ ID NO: 2. In some embodiments, the amino acid sequence of the engineered adenylate kinase comprises at least a substitution set, or amino acid residues 136A/150S/217P, wherein the amino acid positions are relative to the reference sequence corresponding to amino acid residues 12-231 of SEQ ID NO: 2, or relative to the reference sequence corresponding to SEQ ID NO: 2. In some embodiments, the amino acid sequence of the engineered adenylate kinase comprises at least a substitution set Q136A/I150S/N217P, wherein the amino acid positions are relative to the reference sequence corresponding to amino acid residues 12-231 of SEQ ID NO: 2, or relative to the reference sequence corresponding to SEQ ID NO: 2.

[0260] In some embodiments, the amino acid sequence of the engineered adenylate kinase comprises at least a substitution at amino acid position 68, 142, 207, 216, or 218, or combinations thereof, wherein the amino acid positions are relative to the reference sequence corresponding to amino acid residues 12-231 of SEQ ID NO: 2, or relative to the reference sequence corresponding to SEQ ID NO: 2. In some embodiments, the amino acid sequence of the engineered adenylate kinase comprises at least a substitution, or amino acid residue 68L, 142R, 207A, 216P, or 218I, or combinations thereof, wherein the amino acid positions are relative to the reference sequence corresponding to amino acid residues 12-231 of SEQ ID NO: 2, or relative to the reference sequence corresponding to SEQ ID NO: 2. In some embodiments, the amino acid sequence of the engineered adenylate kinase comprises at least a substitution E68L, L142R, K207A, D216P, or V218I, or combinations thereof, wherein the amino acid positions are relative to the reference sequence corresponding to amino acid residues 12-231 of SEQ ID NO: 2, or relative to the reference sequence corresponding to SEQ ID NO: 2.

[0261] In some embodiments, the amino acid sequence of the engineered adenylate kinase comprises at least a substitution set at amino acid positions 68/142/207/216/218, wherein the amino acid positions are relative to the reference sequence corresponding to amino acid residues 12-231 of SEQ ID NO: 2, or relative to the reference sequence corresponding to SEQ ID NO: 2. In some embodiments, the amino acid sequence of the engineered adenylate kinase comprises at least a substitution set, or amino acid residues 68L/142R/207A/216P/218I, wherein the amino acid positions are relative to the reference sequence corresponding to amino acid residues 12-231 of SEQ ID NO: 2, or relative to the reference sequence corresponding to SEQ ID NO: 2. In some embodiments, the amino acid sequence of the engineered adenylate kinase comprises at least a substitution set E68L/L142R/K207A/D216P/V218I, wherein the amino acid positions are relative to the reference sequence corresponding to amino acid residues 12-231 of SEQ ID NO: 2, or relative to the reference sequence corresponding to SEQ ID NO: 2.

[0262] In some embodiments, the amino acid sequence of the engineered adenylate kinase comprises at least a substitution at amino acid position 18, 118, or 170, or combinations thereof, wherein the amino acid positions are relative to the reference sequence corresponding to amino acid residues 12-231 of SEQ ID NO: 2, or relative to the reference sequence corresponding to SEQ ID NO: 2. In some embodiments, the amino acid sequence of the engineered adenylate kinase comprises at least a substitution or amino acid residue 18L, 118G, or 170S, or combinations thereof, wherein the amino acid positions are relative to the reference sequence corresponding to amino acid residues 12-231 of SEQ ID NO: 2, or relative to the reference sequence corresponding to SEQ ID NO: 2. In some embodiments, the amino acid sequence of the engineered adenylate kinase comprises at least a substitution F18L, N118G, or G170S, or combinations thereof, wherein the amino acid positions are relative to the reference sequence corresponding to amino acid residues 12-231 of SEQ ID NO: 2, or relative to the reference sequence corresponding to SEQ ID NO: 2.

[0263] In some embodiments, the amino acid sequence of the engineered adenylate kinase comprises at least a substitution set at amino acid positions 18/118/170, wherein the amino acid positions are relative to the reference sequence corresponding to amino acid residues 12-231 of SEQ ID NO: 2, or relative to the reference sequence corresponding to SEQ ID NO: 2. In some embodiments, the amino acid sequence of the engineered adenylate kinase comprises at least a substitution set, or amino acid residues 18L/118G/170S, wherein the amino acid positions are relative to the reference sequence corresponding to amino acid residues 12-231 of SEQ ID NO: 2, or relative to the reference sequence corresponding to SEQ ID NO: 2. In some embodiments, the amino acid sequence of the engineered adenylate kinase comprises at least a substitution set F18L/N118G/G170S, wherein the amino acid positions are relative to the reference sequence corresponding to amino acid residues 12-231 of SEQ ID NO: 2, or relative to the reference sequence corresponding to SEQ ID NO: 2.

[0264] In some embodiments, the amino acid sequence of the engineered adenylate kinase comprises at least a substitution at amino acid position 77, 143, 214, or 216, or combinations thereof, wherein the amino acid positions are relative to the reference sequence corresponding to amino acid residues 12-231 of SEQ ID NO: 2, or relative to the reference sequence corresponding to SEQ ID NO: 2. In some embodiments, the amino acid sequence of the engineered adenylate kinase comprises at least a substitution, or amino acid residue 77I, 143V, 214E, or 216R, or combinations thereof, wherein the amino acid positions are relative to the reference sequence corresponding to amino acid residues 12-231 of SEQ ID NO: 2, or relative to the reference sequence corresponding to SEQ ID NO: 2. In some embodiments, the amino acid sequence of the engineered adenylate kinase comprises at least a substitution L77I, I143V, G214E, or P216R, or combinations thereof, wherein the amino acid positions are relative to the reference sequence corresponding to amino acid residues 12-231 of SEQ ID NO: 2, or relative to the reference sequence corresponding to SEQ ID NO: 2.

[0265] In some embodiments, the amino acid sequence of the engineered adenylate kinase comprises at least a substitution set at amino acid positions 77/143/214/216, wherein the amino acid positions are relative to the reference sequence corresponding to amino acid residues 12-231 of SEQ ID NO: 2, or relative to the reference sequence corresponding to SEQ ID NO: 2. In some embodiments, the amino acid sequence of the engineered adenylate kinase comprises at least a substitution set, or amino acid residues 77I/143V/214E/216R, wherein the amino acid positions are relative to the reference sequence corresponding to amino acid residues 12-231 of SEQ ID NO: 2, or relative to the reference sequence corresponding to SEQ ID NO: 2. In some embodiments, the amino acid sequence of the engineered adenylate kinase comprises at least a substitution set L77I/I143V/G214E/P216R, wherein the amino acid positions are relative to the reference sequence corresponding to amino acid residues 12-231 of SEQ ID NO: 2, or relative to the reference sequence corresponding to SEQ ID NO: 2.

[0266] In some embodiments, the amino acid sequence of the engineered adenylate kinase comprises at least a substitution at amino acid position 50, 184, or 216, or combinations thereof, wherein the amino acid positions are relative to the reference sequence corresponding to amino acid residues 12-231 of SEQ ID NO: 2, or relative to the reference sequence corresponding to SEQ ID NO: 2. In some embodiments, the amino acid sequence of the engineered adenylate kinase comprises at least a substitution, or amino acid residue 50Q, 184M, or 216M, or combinations thereof, wherein the amino acid positions are relative to the reference sequence corresponding to amino acid residues 12-231 of SEQ ID NO: 2, or relative to the reference sequence corresponding to SEQ ID NO: 2. In some embodiments, the amino acid sequence of the engineered adenylate kinase comprises at least a substitution D50Q, H184M, or R216M, or combinations thereof, wherein the amino acid positions are relative to the reference sequence corresponding to amino acid residues 12-231 of SEQ ID NO: 2, or relative to the reference sequence corresponding to SEQ ID NO: 2.

[0267] In some embodiments, the amino acid sequence of the engineered adenylate kinase comprises at least a substitution set at amino acid positions 50/184/216, wherein the amino acid positions are relative to the reference sequence corresponding to amino acid residues 12-231 of SEQ ID NO: 2, or relative to the reference sequence corresponding to SEQ ID NO: 2. In some embodiments, the amino acid sequence of the engineered adenylate kinase comprises at least a substitution set, or amino acid residues 50Q/184M/216M, wherein the amino acid positions are relative to the reference sequence corresponding to amino acid residues 12-231 of SEQ ID NO: 2, or relative to the reference sequence corresponding to SEQ ID NO: 2. In some embodiments, the amino acid sequence of the engineered adenylate kinase comprises at least a substitution set D50Q/H184M/R216M, wherein the amino acid positions are relative to the reference sequence corresponding to amino acid residues 12-231 of SEQ ID NO: 2, or relative to the reference sequence corresponding to SEQ ID NO: 2.

[0268] In some embodiments, the amino acid sequence of the engineered adenylate kinase comprises at least a substitution at amino acid position 104, 127, 136, or 175, or combinations thereof, wherein the amino acid positions are relative to the reference sequence corresponding to amino acid residues 12-231 of SEQ ID NO: 2, or relative to the reference sequence corresponding to SEQ ID NO: 2. In some embodiments, the amino acid sequence of the engineered adenylate kinase comprises at least a substitution, or amino acid residue 104A, 127L, 136V, or 175F, or combinations thereof, wherein the amino acid positions are relative to the reference sequence corresponding to amino acid residues 12-231 of SEQ ID NO: 2, or relative to the reference sequence corresponding to SEQ ID NO: 2. In some embodiments, the amino acid sequence of the engineered adenylate kinase comprises at least a substitution V104A, I127L, A136V, or L175F, or combinations thereof, wherein the amino acid positions are relative to the reference sequence corresponding to amino acid residues 12-231 of SEQ ID NO: 2, or relative to the reference sequence corresponding to SEQ ID NO: 2.

[0269] In some embodiments, the amino acid sequence of the engineered adenylate kinase comprises at least a substitution set at amino acid positions 104/127/136/175, wherein the amino acid positions are relative to the reference sequence corresponding to amino acid residues 12-231 of SEQ ID NO: 2, or relative to the reference sequence corresponding to SEQ ID NO: 2. In some embodiments, the amino acid sequence of the engineered adenylate kinase comprises at least a substitution set, or amino acid residues 104A/127L/136V/175F, wherein the amino acid positions are relative to the reference sequence corresponding to amino acid residues 12-231 of SEQ ID NO: 2, or relative to the reference sequence corresponding to SEQ ID NO: 2. In some embodiments, the amino acid sequence of the engineered adenylate kinase comprises at least a substitution set V104A/I127L/A136V/L175F, wherein the amino acid positions are relative to the reference sequence corresponding to amino acid residues 12-231 of SEQ ID NO: 2, or relative to the reference sequence corresponding to SEQ ID NO: 2.

[0270] In some embodiments, the amino acid sequence of the engineered adenylate kinase comprises at least a substitution at amino acid position 151 or 157, or combinations thereof, wherein the amino acid positions are relative to the reference sequence corresponding to amino acid residues 12-231 of SEQ ID NO: 2, or relative to the reference sequence corresponding to SEQ ID NO: 2. In some embodiments, the amino acid sequence of the engineered adenylate kinase comprises at least a substitution, or amino acid residue 151F or 157V, or combinations thereof, wherein the amino acid positions are relative to the reference sequence corresponding to amino acid residues 12-231 of SEQ ID NO: 2, or relative to the reference sequence corresponding to SEQ ID NO: 2. In some embodiments, the amino acid sequence of the engineered adenylate kinase comprises at least a substitution Y151F or P157V, or combinations thereof, wherein the amino acid positions are relative to the reference sequence corresponding to amino acid residues 12-231 of SEQ ID NO: 2, or relative to the reference sequence corresponding to SEQ ID NO: 2.

[0271] In some embodiments, the amino acid sequence of the engineered adenylate kinase comprises at least a substitution set at amino acid positions 151/157, wherein the amino acid positions are relative to the reference sequence corresponding to amino acid residues 12-231 of SEQ ID NO: 2, or relative to the reference sequence corresponding to SEQ ID NO: 2. In some embodiments, the amino acid sequence of the engineered adenylate kinase comprises at least a substitution set, or amino acid residues 151F/157V, wherein the amino acid positions are relative to the reference sequence corresponding to amino acid residues 12-231 of SEQ ID NO: 2, or relative to the reference sequence corresponding to SEQ ID NO: 2. In some embodiments, the amino acid sequence of the engineered adenylate kinase comprises at least a substitution set Y151F/P157V, wherein the amino acid positions are relative to the reference sequence corresponding to amino acid residues 12-231 of SEQ ID NO: 2, or relative to the reference sequence corresponding to SEQ ID NO: 2.

[0272] In some embodiments, the amino acid sequence of the engineered adenylate kinase comprises at least a substitution at amino acid position 83, 190, 201, or 216, or combinations thereof, wherein the amino acid positions are relative to the reference sequence corresponding to amino acid residues 12-231 of SEQ ID NO: 2, or relative to the reference sequence corresponding to SEQ ID NO: 2. In some embodiments, the amino acid sequence of the engineered adenylate kinase comprises at least a substitution, or amino acid residue 83L, 190Q, 201A, or 216E, or combinations thereof, wherein the amino acid positions are relative to the reference sequence corresponding to amino acid residues 12-231 of SEQ ID NO: 2, or relative to the reference sequence corresponding to SEQ ID NO: 2. In some embodiments, the amino acid sequence of the engineered adenylate kinase comprises at least a substitution K83L, R190Q, S201A, or M216E, or combinations thereof, wherein the amino acid positions are relative to the reference sequence corresponding to amino acid residues 12-231 of SEQ ID NO: 2, or relative to the reference sequence corresponding to SEQ ID NO: 2.

[0273] In some embodiments, the amino acid sequence of the engineered adenylate kinase comprises at least a substitution set at amino acid positions 83/190/201/216, wherein the amino acid positions are relative to the reference sequence corresponding to amino acid residues 12-231 of SEQ ID NO: 2, or relative to the reference sequence corresponding to SEQ ID NO: 2. In some embodiments, the amino acid sequence of the engineered adenylate kinase comprises at least a substitution set, or amino acid residues 83L/190Q/201A/216E, wherein the amino acid positions are relative to the reference sequence corresponding to amino acid residues 12-231 of SEQ ID NO: 2, or relative to the reference sequence corresponding to SEQ ID NO: 2. In some embodiments, the amino acid sequence of the engineered adenylate kinase comprises at least a substitution set K83L/R190Q/S201A/M216E, wherein the amino acid positions are relative to the reference sequence corresponding to amino acid residues 12-231 of SEQ ID NO: 2, or relative to the reference sequence corresponding to SEQ ID NO: 2. 151/157

[0274] In some embodiments, the amino acid sequence of the engineered adenylate kinase comprises at least a substitution or substitution set at amino acid position(s) 29/30/128/142/186/212/213, 18/142/212/213, 29/30/128/142/186, 40/135/214, 18/29/30/127/150, 82, 69, 118, 29/30, 206, 32, 16, 104, 111/135/136/214, 29/128/175, 178, 18/128/142, 32/108/111/156/191, 18/29/128/129/142/186, 32/133, 18/29/30/212/213/222, 29/65/127, 32/40/43/52/155/156/217, 18/29/128/129, 80, 32/43/138/152/191/214/215, 183, 18/175/186/212/213, 129, 18/29/30/65/129/142/150/186, 127/142/212/213, 30/65/142/222, 40/43/215, 136, 29/150/211/212/213/221, 43/111/136/219, 226, 88, 140/215/216, 32/133/134, or 18/29/128/186, wherein the amino acid positions are relative to the reference sequence corresponding to amino acid residues 12-231 of SEQ ID NO: 2, or relative to the reference sequence corresponding to SEQ ID NO: 2.

[0275] In some embodiments, the amino acid sequence of the engineered adenylate kinase comprises at least a substitution or substitution set, or amino acid residue(s) 29Q/30S/128K/142L/186L/212S/213Q, 18L/142L/212S/213Q, 29Q/30S/128K/142L/186L, 40C/135P/214P, 18L/29Q/30S/127L/150S, 82I, 69Q, 118G, 29Q/305, 206W, 32N, 16M, 104I, 111E/135P/136A/214P, 29Q/128K/1755, 178N, 18L/128K/142L, 32N/108M/111E/156N/191K, 18L/29Q/128K/129I/142L/186L, 32N/133L, 18L/29Q/30S/212S/213Q/222I, 29Q/65K/127L, 32N/40C/43G/52H/155F/156N/217T, 18L/29Q/128K/129I, 80N, 32N/43G/138I/152H/191K/214P/215V, 183Q, 18L/1755/186L/212S/213Q, 129I, 18L/29Q/30S/65K/129I/142L/150S/186L, 127L/142L/212S/213Q, 30S/65K/142L/222I, 40C/43G/215V, 136A, 29Q/150S/211A/212S/213Q/221D, 43G/111E/136A/219W, 226L, 88N, 140G/215V/216A, 32N/133L/134L, or 18L/29Q/128K/186L, wherein the amino acid positions are relative to the reference sequence corresponding to amino acid residues 12-231 of SEQ ID NO: 2, or relative to the reference sequence corresponding to SEQ ID NO: 2.

[0276] In some embodiments, the amino acid sequence of the engineered adenylate kinase comprises at least a substitution or substitution set Y29Q/A30S/D128K/R142L/Y186L/T212S/I213Q, F18L/R142L/T212S/I213Q, Y29Q/A30S/D128K/R142L/Y186L, P40C/V135P/G214P, F18L/Y29Q/A30S/F127L/I150S, V82I, K69Q, N118G, Y29Q/A30S, L206W, R32N, L16M, V104I, D111E/V135P/Q136A/G214P, Y29Q/D128K/D175S, K178N, F18L/D128K/R142L, R32N/E108M/D111E/L156N/E191K, F18L/Y29Q/D128K/V129I/R142L/Y186L, R32N/V133L, F18L/Y29Q/A30S/T212S/I213Q/V222I, Y29Q/E65K/F127L, R32N/P40C/S43G/V52H/S155F/L156N/N217T, F18L/Y29Q/D128K/V129I, E80N, R32N/S43G/L138I/N152H/E191K/G214P/I215V, R183Q, F18L/D175S/Y186L/T212S/I213Q, V129I, F18L/Y29Q/A30S/E65K/V129I/R142L/I150S/Y186L, F127L/R142L/T212S/I213Q, A30S/E65K/R142L/V222I, P40C/S43G/I215V, Q136A, Y29Q/I150S/G211A/T212S/I213Q/E221D, S43G/D111E/Q136A/V219W, I226L, E88N, S140G/I215V/D216A, R32N/V133L/V134L, or F18L/Y29Q/D128K/Y186L, wherein the amino acid positions are relative to the reference sequence corresponding to amino acid residues 12-231 of SEQ ID NO: 2, or relative to the reference sequence corresponding to SEQ ID NO: 2.

[0277] In some embodiments, the amino acid sequence of the engineered adenylate kinase comprises at least a substitution at an amino acid position set forth in Tables 7.2, 8.2, 9.2, 10.2, 11.2, 12.1, 13.2, 14.1, 15.2, 16.2, 17.2, 18.2, 19.2, 20.2, 21.2, 23.2, 24.2, 25.2, 26.2, 27.2, 28.2, 29.2, 30.2, 31.2, 32.2, 33.2, 34.2, 35.2, 36.2, 37.2, 38.2, 40.2, 41.2, 42.2, 43.2, 44.2, 45.2, 46.2, 47.2, 48.2, and 49.2, wherein the amino acid positions are relative to the reference sequence corresponding to amino acid residues 12-231 of SEQ ID NO: 2, or relative to the reference sequence corresponding to SEQ ID NO: 2.

[0278] In some embodiments, the amino acid sequence of the engineered adenylate kinase comprises at least one substitution set forth in Tables 7.2, 8.2, 9.2, 10.2, 11.2, 12.1, 13.2, 14.1, 15.2, 16.2, 17.2, 18.2, 19.2, 20.2, 21.2, 23.2, 24.2, 25.2, 26.2, 27.2, 28.2, 29.2, 30.2, 31.2, 32.2, 33.2, 34.2, 35.2, 36.2, 37.2, 38.2, 40.2, 41.2, 42.2, 43.2, 44.2, 45.2, 46.2, 47.2, 48.2, and 49.2, wherein the amino acid positions are relative to the reference sequence corresponding to amino acid residues 12-231 of SEQ ID NO: 2, or relative to the reference sequence corresponding to SEQ ID NO: 2.

[0279] In some embodiments, the amino acid sequence of the engineered adenylate kinase comprises at least a substitution or substitution set at amino acid position(s) set forth in Tables 7.2, 8.2, 9.2, 10.2, 11.2, 12.1, 13.2, 14.1, 15.2, 16.2, 17.2, 18.2, 19.2, 20.2, 21.2, 23.2, 24.2, 25.2, 26.2, 27.2, 28.2, 29.2, 30.2, 31.2, 32.2, 33.2, 34.2, 35.2, 36.2, 37.2, 38.2, 40.2, 41.2, 42.2, 43.2, 44.2, 45.2, 46.2, 47.2, 48.2, and 49.2, wherein the amino acid positions are relative to the reference sequence corresponding to amino acid residues 12-231 of SEQ ID NO: 2, or relative to the reference sequence corresponding to SEQ ID NO: 2.

[0280] In some embodiments, the amino acid sequence of the engineered adenylate kinase comprises at least a substitution or substitution set of an engineered adenylate kinase variant set forth in Tables 7.2, 8.2, 9.2, 10.2, 11.2, 12.1, 13.2, 14.1, 15.2, 16.2, 17.2, 18.2, 19.2, 20.2, 21.2, 23.2, 24.2, 25.2, 26.2, 27.2, 28.2, 29.2, 30.2, 31.2, 32.2, 33.2, 34.2, 35.2, 36.2, 37.2, 38.2, 40.2, 41.2, 42.2, 43.2, 44.2, 45.2, 46.2, 47.2, 48.2, and 49.2, wherein the amino acid positions are relative to the reference sequence corresponding to amino acid residues 12-231 of SEQ ID NO: 2, or relative to the reference sequence corresponding to SEQ ID NO: 2.

[0281] In some embodiments, the engineered adenylate kinase comprises an amino acid sequence having at least 70%, 75%, 80%, 81%, 82%, 83%, 84%, 85%, 86%, 87%, 88%, 89%, 90%, 91%, 92%, 93%, 94%, 95%, 96%, 97%, 98%, 99% or more sequence identity to a reference amino acid sequence comprising a substitution or substitution set of an engineered adenylate kinase variant set forth in Tables 7.2, 8.2, 9.2, 10.2, 11.2, 12.1, 13.2, 14.1, 15.2, 16.2, 17.2, 18.2, 19.2, 20.2, 21.2, 23.2, 24.2, 25.2, 26.2, 27.2, 28.2, 29.2, 30.2, 31.2, 32.2, 33.2, 34.2, 35.2, 36.2, 37.2, 38.2, 40.2, 41.2, 42.2, 43.2, 44.2, 45.2, 46.2, 47.2, 48.2, and 49.2, wherein the amino acid positions are relative to the reference sequence corresponding to amino acid residues 12-231 of SEQ ID NO: 2, or relative to the reference sequence corresponding to SEQ ID NO: 2.

[0282] In some embodiments, the engineered adenylate kinase comprises an amino acid sequence having at least 70%, 75%, 80%, 81%, 82%, 83%, 84%, 85%, 86%, 87%, 88%, 89%, 90%, 91%, 92%, 93%, 94%, 95%, 96%, 97%, 98%, 99%, or more sequence identity to the reference sequence corresponding to residues 12-231 of SEQ ID NO: 4, 172, 376, 508, 524, 584, 610, 674, 816, 874, 1032, 1388, 1708, 1952, 1980, 2072, 2138, 2294, 2368, 2602, 2832, 2994, or 3104, or to the reference sequence corresponding to SEQ ID NO: 4, 172, 376, 508, 524, 584, 610, 674, 816, 874, 1032, 1388, 1708, 1952, 1980, 2072, 2138, 2294, 2368, 2602, 2832, 2994, or 3104.

[0283] In some embodiments, the engineered adenylate kinase comprises an amino acid sequence having at least 70%, 75%, 80%, 81%, 82%, 83%, 84%, 85%, 86%, 87%, 88%, 89%, 90%, 91%, 92%, 93%, 94%, 95%, 96%, 97%, 98%, 99%, or more sequence identity to a reference sequence corresponding to residues 12-231 of an even-numbered SEQ ID NO. of SEQ ID NOs: 4-1302, 1356-2652, and 2676-3192, or to a reference sequence corresponding to an even-numbered SEQ ID NO. of SEQ ID NOs: 4-1302, 1356-2652, and 2676-3192.

[0284] In some embodiments, the engineered adenylate kinase comprises an amino acid sequence having at least 70%, 75%, 80%, 81%, 82%, 83%, 84%, 85%, 86%, 87%, 88%, 89%, 90%, 91%, 92%, 93%, 94%, 95%, 96%, 97%, 98%, 99%, or more sequence identity to the reference sequence corresponding to residues 12-231 of SEQ ID NO: 4, 172, 376, 508, 524, 584, 610, 674, 816, 874, 1032, 1388, 1708, 1952, 1980, 2072, 2138, 2294, 2368, 2602, 2832, 2994, or 3104, or to the reference sequence corresponding to SEQ ID NO: 4, 172, 376, 508, 524, 584, 610, 674, 816, 874, 1032, 1388, 1708, 1952, 1980, 2072, 2138, 2294, 2368, 2602, 2832, 2994, or 3104, wherein the amino acid sequence comprises one or more substitutions relative to the reference sequence corresponding to residues 12-231 of SEQ ID NO: 4, 172, 376, 508, 524, 584, 610, 674, 816, 874, 1032, 1388, 1708, 1952, 1980, 2072, 2138, 2294, 2368, 2602, 2832, 2994, or 3104, or relative to the reference sequence corresponding to SEQ ID NO: 4, 172, 376, 508, 524, 584, 610, 674, 816, 874, 1032, 1388, 1708, 1952, 1980, 2072, 2138, 2294, 2368, 2602, 2832, 2994, or 3104.

[0285] In some embodiments, the engineered adenylate kinase comprises an amino acid sequence having at least 70%, 75%, 80%, 81%, 82%, 83%, 84%, 85%, 86%, 87%, 88%, 89%, 90%, 91%, 92%, 93%, 94%, 95%, 96%, 97%, 98%, 99%, or more sequence identity to the reference sequence corresponding to residues 12-231 of an even-numbered SEQ ID NO. of SEQ ID NOs: 4-1302, 1356-2652, and 2676-3192, or to the reference sequence corresponding to an even-numbered SEQ ID NO. of SEQ ID NOs: 4-1302, 1356-2652, and 2676-3192, wherein the amino acid sequence comprises one or more substitutions relative to the reference sequence corresponding to residues 12-231 of SEQ ID NO: 4, 172, 376, 508, 524, 584, 610, 674, 816, 874, 1032, 1388, 1708, 1952, 1980, 2072, 2138, 2294, 2368, 2602, 2832, 2994, or 3104, or relative to the reference sequence corresponding to SEQ ID NO: 4, 172, 376, 508, 524, 584, 610, 674, 816, 874, 1032, 1388, 1708, 1952, 1980, 2072, 2138, 2294, 2368, 2602, 2832, 2994, or 3104.

[0286] In some embodiments, the amino acid sequence of the engineered adenylate kinase comprises at least a substitution at amino acid position 11, 13, 14, 15, 16, 18, 20, 21, 22, 26, 27, 29, 30, 31, 32, 34, 35, 36, 37, 38, 39, 40, 42, 43, 44, 46, 48, 50, 51, 52, 53, 54, 55, 56, 57, 58, 59, 60, 61, 62, 63, 64, 65, 66, 67, 68, 69, 70, 71, 73, 74, 75, 76, 77, 78, 79, 80, 81, 82, 83, 84, 87, 88, 89, 90, 91, 92, 93, 94, 97, 98, 99, 100, 101, 102, 104, 105, 108, 109, 110, 111, 112, 113, 115, 116, 117, 118, 119, 120, 122, 123, 124, 125, 126, 127, 128, 129, 131, 132, 133, 134, 135, 136, 137, 138, 139, 140, 141, 142, 143, 146, 148, 149, 150, 151, 152, 153, 154, 155, 156, 157, 161, 162, 163, 166, 168, 169, 170, 172, 173, 175, 178, 179, 180, 181, 182, 183, 184, 186, 187, 188, 190, 191, 192, 194, 195, 196, 197, 198, 199, 200, 201, 202, 203, 204, 205, 206, 207, 208, 210, 211, 212, 213, 214, 215, 216, 217, 218, 219, 220, 221, 222, 223, 224, 225, 226, 227, 228, 229, 230, or 231, or combinations thereof, wherein the amino acid positions are relative to the reference sequence corresponding to residues 12-231 of SEQ ID NO: 4, 172, 376, 508, 524, 584, 610, 674, 816, 874, 1032, 1388, 1708, 1952, 1980, 2072, 2138, 2294, 2368, 2602, 2832, 2994, or 3104, or relative to the reference sequence corresponding to SEQ ID NO: 4, 172, 376, 508, 524, 584, 610, 674, 816, 874, 1032, 1388, 1708, 1952, 1980, 2072, 2138, 2294, 2368, 2602, 2832, 2994, or 3104.

[0287] In some embodiments, the amino acid sequence of the engineered adenylate kinase comprises at least a substitution, or amino acid residue 1 ID, 13G/S, 14C/E, 15F, 16M, 18C/E/L, 20A/P/R/T/V, 21L/N/R/S/T/V, 22A/S, 26L, 27C/S, 29Q/R, 30G/L/S/Y, 31R, 32F/I/L/N, 34A/E/S/V, 35A/E/F/L/S, 36A/E/I/L/M/Q/R/S/V/Y, 37F/G/I/L/R/Y, 38C/F/L/R, 39A/M/Q/T, 40C/F/L/S/T, 42T, 43A/C/G/H/N, 44S, 46E/F/L/M/Y, 48F/L, 50A/C/L/N/Q/R/S/V, 51F/G/K/L/M/R/T, 52A/H, 53A/M/S, 54G/H/I/M/Q/R/T, 55G/L/Q/S, 56E/Q/T, 57H/L/P/S, 58C/G/Y, 59E/G/H/M/P/R/T/V/W/Y, 60A/C/P/S/W, 61A/E/N/P/S/V, 62A/E/G/I/L/S, 635, 64R, 65A/D/F/K/P/T, 66A/C/D/E/F/G/H/N/P/Q/R/S/T/V/W, 67R, 68A/D/E/G/I/L/Q/R/S/T/V/W/Y, 69F/L/Q/R/Y, 70R, 71T, 73I/R, 74C/G/Q/S, 75L, 76G/L/P, 77A/I/M/Q/S, 78C/G/N/T, 79A/K/L/P/W, 80A/D/G/L/N/P/R/S/V/W, 81F/I/L/Q/S, 82I/L/P/Q/T, 83G/H/L/S/T, 84A/E/H/M/S, 87A/E/I/K/L/M/R/V/Y, 88N/R/T, 89A/H/I/L/P/Q/T/V, 90C/E/F/K/S/T/V, 91A/F/G/L/S/V, 92L/S, 93A/E/G/P/S/T/V/Y, 94A/C/F/M/Q/S/T/V/Y, 97I, 98A/G/Q, 99A/C, 100F/S/V, 101-, 102A/C/N, 104A/F/H/I/L/Q/R/S/W, 105G/K/L/M/R/S, 108M/R/S/V, 109E/Y, 110C/F, 111E/P/R, 112A/C/E/K/M/N/Q/R/T, 113E/W/Y, 115G/K/R, 116A/E/F/L, 117L/N/S, 118A/G/L/R/S, 119F/K/L/P/R/S, 120G/K/L/R/S/T, 122A/H/S, 123S, 124V, 125I, 126A/E/S/V, 127I/L/P/S, 128C/E/I/K/N/R/S, 129I/L/P/S, 131A/G/V, 132G/K/L/T/V, 133F/Q/S/V/W, 133A/E/F/L/Q/S/V/W, 134L, 135I/K/M/P/R/S, 136A/I/L/S/V/Y, 137L, 138C/I/M/V, 139A/H/L/R, 140G, 141G/V, 142F/L/M/W, 143A/C/G/P/R/S/T/V, 146D/H/N/R/V, 148F/H/M/P/Q/R/S/T, 149L, 150C/G/L/P/S/V, 151A/F/R/Y, 152F/H, 153C/K/S/V, 154Q/R, 155A/F/T/W, 156A/C/N/T/V, 157P/V, 161G/L, 162G, 163G/Q/S, 166C/F/L/P/S, 168G/L/N/Q/S, 169A/D/I/Y, 170A/G/H/P/R/S, 172A/H/M/S/T, 173F/K/R/S/T/V, 175F/L/S, 178E/G/N/R, 179A/C/G/I/L/P/V, 180G/H/P, 181C/I/V, 182A/G/I/L/Q/S, 183A/L/Q, 184I/K/M/N/R/S/T/V, 186L, 187G/Y, 188G/L, 190A/C/E/G/H/N/Q/R, 191D/K, 192A/H/I/W, 194F/L/R/V/Y, 195G/I/M/R, 196I, 197A/L/Q/V, 198G, 199R, 200A, 201A/F/K/L/S, 202E/G/M/S, 203A/E/L/R, 204R/S, 205L/P, 206W, 207A/L/T, 208E, 210V, 211A, 212C/H/I/L/M/N/P/Q/R/S/W, 213L/P/Q/S, 214A/E/L/M/P/R/T/W, 215A/P/V, 216A/D/E/G/H/L/M/N/P/R/S/T/V, 217E/G/H/P/T, 218A/I/L, 219A/F/G/L/P/S/T/W, 220E/V, 221D, 222I/T, 223T, 224G/S/T, 225A/L/Q/R/T/V, 226K/L/P/R/S/T, 227P, 228D/F/G/I/L/P/Q/R/S/T/V, 229C/I, 230A/M/P/Q, or 231A/Q/R/T, or combinations thereof, wherein the amino acid positions are relative to the reference sequence corresponding to residues 12-231 of SEQ ID NO: 4, 172, 376, 508, 524, 584, 610, 674, 816, 874, 1032, 1388, 1708, 1952, 1980, 2072, 2138, 2294, 2368, 2602, 2832, 2994, or 3104, or relative to the reference sequence corresponding to SEQ ID NO: 4, 172, 376, 508, 524, 584, 610, 674, 816, 874, 1032, 1388, 1708, 1952, 1980, 2072, 2138, 2294, 2368, 2602, 2832, 2994, or 3104.

[0288] In some embodiments, the amino acid sequence of the engineered adenylate kinase comprises at least a substitution at amino acid position 13, 18, 29, 30, 31, 32, 34, 35, 48, 50, 53, 55, 59, 60, 61, 62, 66, 68, 77, 78, 80, 83, 87, 100, 104, 105, 109, 118, 119, 127, 128, 133, 136, 139, 142, 143, 150, 151, 155, 157, 168, 170, 175, 184, 186, 190, 201, 207, 212, 213, 214, 216, 217, 218, 224, or 226, or combinations thereof, wherein the amino acid positions are relative to the reference sequence corresponding to residues 12-231 of SEQ ID NO: 4, 172, 376, 508, 524, 584, 610, 674, 816, 874, 1032, 1388, 1708, 1952, 1980, 2072, 2138, 2294, 2368, 2602, 2832, 2994, or 3104, or relative to the reference sequence corresponding to SEQ ID NO: 4, 172, 376, 508, 524, 584, 610, 674, 816, 874, 1032, 1388, 1708, 1952, 1980, 2072, 2138, 2294, 2368, 2602, 2832, 2994, or 3104.

[0289] In some embodiments, the amino acid sequence of the engineered adenylate kinase comprises at least a substitution or amino acid residue 13G/S, 18C/E/L, 29R/Q, 30G/L/S/Y, 31R, 32F/I/L/N, 34A/E/S/V, 35A/E/F/L/S, 48F, 50A/C/L/N/Q/R/S/V, 53A/M/S, 55G/L/Q/S, 59E/G/H/L/M/P/R/T/V/W/Y, 60A/C/P/S/W, 61A/E/N/P/S/V, 62A/E/G/I/L/S, 66A/C/D/E/F/G/H/N/P/Q/R/S/T/V/W, 68A/D/E/G/I/L/Q/R/S/T/V/W/Y, 77A/I/M/Q/S, 78C/G/N/T, 80A/D/G/L/N/P/R/S/V/W, 83G/H/L/S/T, 87A/E/I/K/L/M/R/V/Y, 100F/S/V, 104A/F/H/I/L/Q/R/S/W, 105G/K/L/M/R/S, 109E/Y, 118A/G/L/R/S, 119F/K/L/P/R/S, 127I/L/P/S, 128C/E/I/K/N/R/S, 133A/E/F/L/Q/S/V/W, 136A/I/L/S/V/Y, 139A/H/L/R, 142F/L/M/W, 143A/C/G/P/R/S/T/V, 150C/G/L/P/S/V, 151A/F/R/Y, 155A/F/T/W, 157P/V, 168G/L/N/Q/S, 170A/G/H/P/R/S, 175F/L/S, 184I/K/M/N/R/S/T/V, 186L, 190A/C/E/G/H/N/Q/R, 201A/F/K/L/S, 207A/L/T, 212C/H/I/L/M/N/P/Q/R/S/W, 213L/P/Q/S, 214A/E/L/M/P/R/T/W, 216A/E/G/H/L/M/N/P/R/S/T/V/W, 217E/G/H/P/T, 218A/I/L, 224G/S/T, or 226K/L/P/R/S/T, or combinations thereof, wherein the amino acid positions are relative to the reference sequence corresponding to residues 12-231 of SEQ ID NO: 4, 172, 376, 508, 524, 584, 610, 674, 816, 874, 1032, 1388, 1708, 1952, 1980, 2072, 2138, 2294, 2368, 2602, 2832, 2994, or 3104, or relative to the reference sequence corresponding to SEQ ID NO: 4, 172, 376, 508, 524, 584, 610, 674, 816, 874, 1032, 1388, 1708, 1952, 1980, 2072, 2138, 2294, 2368, 2602, 2832, 2994, or 3104.

[0290] In some embodiments, the amino acid sequence of the engineered adenylate kinase comprises at least a substitution or amino acid residue(s) 13G, 18L, 29Q, 30G/S, 31R, 32I, 34S, 35A, 48L, 50Q, 53A, 55Q, 59V, 60A, 61S, 62S, 66W, 68L, 77I, 78G, 80A/P, 83L, 87K, 100F, 104A, 105R, 109Y, 118G, 119R, 127I/L, 128E/K, 133E, 136A/V, 139L, 142L/R, 143V, 150S, 151F, 155F, 157V, 168G, 170G/S, 170S, 175F/L, 184M, 186L, 190Q/R, 201A/S, 207A, 212S, 213Q, 214E, 216E/M/P/R, 217P, 218I, 224G, or 226L, or combinations thereof, wherein the amino acid positions are relative to the reference sequence corresponding to residues 12-231 of SEQ ID NO: 4, 172, 376, 508, 524, 584, 610, 674, 816, 874, 1032, 1388, 1708, 1952, 1980, 2072, 2138, 2294, 2368, 2602, 2832, 2994, or 3104, or relative to the reference sequence corresponding to SEQ ID NO: 4, 172, 376, 508, 524, 584, 610, 674, 816, 874, 1032, 1388, 1708, 1952, 1980, 2072, 2138, 2294, 2368, 2602, 2832, 2994, or 3104.

[0291] In some embodiments, the engineered adenylate kinase comprises an amino acid sequence having at least 70%, 75%, 80%, 81%, 82%, 83%, 84%, 85%, 86%, 87%, 88%, 89%, 90%, 91%, 92%, 93%, 94%, 95%, 96%, 97%, 98%, 99%, or more sequence identity to the reference sequence corresponding to residues 12-231 of SEQ ID NO: 4, or to the reference sequence corresponding to SEQ ID NO: 4, wherein the amino acid sequence comprises one or more substitutions relative to the reference sequence corresponding to residues 12-231 of SEQ ID NO: 4, or relative to the reference sequence corresponding to SEQ ID NO: 4.

[0292] In some embodiments, the engineered adenylate kinase comprises an amino acid sequence having at least 70%, 75%, 80%, 81%, 82%, 83%, 84%, 85%, 86%, 87%, 88%, 89%, 90%, 91%, 92%, 93%, 94%, 95%, 96%, 97%, 98%, 99%, or more sequence identity to the reference sequence corresponding to residues 12-231 of an even-numbered SEQ ID NO. of SEQ ID NOs: 86-372, or to the reference sequence corresponding to an even-numbered SEQ ID NO. of SEQ ID NOs: 86-372, wherein the amino acid sequence comprises one or more substitutions relative to the reference sequence corresponding to residues 12-231 of SEQ ID NO: 4, or relative to the reference sequence corresponding to SEQ ID NO: 4.

[0293] In some embodiments, the amino acid sequence of the engineered adenylate kinase comprises at least a substitution or substitution set at amino acid position(s) 100/101, 94, 179, 198, 57, 78, 68, 93, 77, 62, 14, 51, 118, 91, 163, 65, 173, 224, 66, 109, 60, 40/88, 191, 63, 68/170, 100, 108, 58, 180, 178, 199, 40, 80/203, 40/43, 39, 55, 110, 51/59, 155/226, 80, 219, 166, 202, 59, 38, 90, 80/184/203, 35, 222, 54, 111/153/155, 112, 175, 74, 105, 170, 117, 128, 61, 119, 155, 79, 220, 226, 108/155, 108/111, 111, 69/88, 43, 43/69/138, 40/43/88/134/178, 214, 80/82/184/219, 88/136, 16/40/43/88, 40/134, 88, 111/155, 223, 115, 190, 201, 126, 56, 216, 76, 69, 120, 116, 203, 194, or 138, wherein the amino acid positions are relative to the reference sequence corresponding to residues 12-231 of SEQ ID NO: 4, or relative to the reference sequence corresponding to SEQ ID NO: 4.

[0294] In some embodiments, the amino acid sequence of the engineered adenylate kinase comprises at least a substitution or substitution set, or amino acid residue(s) 100V/101-, 94S, 179L, 198G, 57P, 78G, 68R, 93V, 77S, 62L, 14C, 51R, 118R, 91F, 163G, 65P, 173R, 224G, 66E, 109E, 60S, 40C/88N, 191D, 63S, 68D/170P, 100S, 51M, 108S, 58G, 57H, 180G, 178R, 199R, 40C, 94Q, 80N/203A, 40C/43G, 39T, 62S, 40L, 55Q, 110C, 51R/59R, 155F/226L, 80N, 219T, 166P, 60P, 202S, 59T, 80A, 38L, 94C, 62A, 51K, 90E, 59M, 80N/184K/203A, 35S, 222T, 178G, 40T, 54M, 111E/153K/155F, 62I, 80G, 112M, 175S, 74S, 14E, 57L, 51G, 94F, 68A, 105R, 170A, 117N, 128S, 40F, 112C, 94A, 61A, 68W, 202G, 180P, 119R, 119R, I66G, 179G, 155F, 59V, 79L, 220E, 51F, 93A, 226L, 108M/155F, 108M/111E, 111E, 69Q/88N, 43G, 43G/69Q/138I, 40C/43G/88N/134L/178N, 214P, 80N/82I/184K/219W, 88N/136A, 16M/40C/43G/88N, 40C/134L, 88N, 111E/155F, 223T, 74G, 115R, 39Q, 93E, 119L, 190N, 202M, 55S, 51L, 112Q, 94T, 66A, 201A, 201K, 201L, 66R, 128N, 214L, 126S, 56E, 1791, 216S, 76P, 69Y, 115G, 166C, 120L, 116L, 108V, 203E, 194F, 138M, 178E, or 38C, wherein the amino acid positions are relative to the reference sequence corresponding to residues 12-231 of SEQ ID NO: 4, or relative to the reference sequence corresponding to SEQ ID NO: 4.

[0295] In some embodiments, the amino acid sequence of the engineered adenylate kinase comprises at least a substitution or substitution set Y100V/P101-, G94S, E179L, D198G, D57P, V78G, E68R, K93V, L77S, K62L, A14C, 151R, N118R, C91F, L163G, E65P, Q173R, K224G, 166E, F109E, G60S, P40C/E88N, E191D, 163S, E68D/K170P, Y100S, 151M, E108S, E58G, D57H, E180G, K178R, Y199R, P40C, G94Q, E80N/K203A, P40C/S43G, I39T, K62S, P40L, E55Q, L110C, I51R/L59R, S155F/I226L, E80N, V219T, D166P, G60P, K202S, L59T, E80A, G38L, G94C, K62A, I51K, D90E, L59M, E80N/H184K/K203A, E35S, V222T, K178G, P40T, K54M, D111E/M153K/S155F, K62I, E80G, S112M, D175S, P74S, A14E, D57L, I51G, G94F, E68A, A105R, K170A, Q117N, K128S, P40F, S112C, G94A, K61A, E68W, K202G, E180P, K119R, K119R, I66G, E179G, S155F, L59V, N79L, A220E, 151F, K93A, 1226L, E108M/S155F, E108M/D111E, D111E, K69Q/E88N, S43G, S43G/K69Q/L138I, P40C/S43G/E88N/V134L/K178N, G214P, E80N/V82I/H184K/V219W, E88N/Q136A, L16M/P40C/S43G/E88N, P40C/V134L, E88N, D111E/S155F, L223T, P74G, E115R, 139Q, K93E, K119L, L190N, K202M, E55S, I51L, S112Q, G94T, I66A, G201A, G201K, G201L, I66R, K128N, G214L, L126S, N56E, E1791, D216S, E76P, K69Y, E115G, D166C, Q120L, S116L, E108V, K203E, Q194F, L138M, K178E, or G38C, wherein the amino acid positions are relative to the reference sequence corresponding to residues 12-231 of SEQ ID NO: 4, or relative to the reference sequence corresponding to SEQ ID NO: 4.

[0296] In some embodiments, the engineered adenylate kinase comprises an amino acid sequence having at least 70%, 75%, 80%, 81%, 82%, 83%, 84%, 85%, 86%, 87%, 88%, 89%, 90%, 91%, 92%, 93%, 94%, 95%, 96%, 97%, 98%, 99%, or more sequence identity to the reference sequence corresponding to residues 12-231 of SEQ ID NO: 172, or to the reference sequence corresponding to SEQ ID NO: 172, wherein the amino acid sequence comprises one or more substitutions relative to the reference sequence corresponding to residues 12-231 of SEQ ID NO: 172, or relative to the reference sequence corresponding to SEQ ID NO: 172.

[0297] In some embodiments, the engineered adenylate kinase comprises an amino acid sequence having at least 70%, 75%, 80%, 81%, 82%, 83%, 84%, 85%, 86%, 87%, 88%, 89%, 90%, 91%, 92%, 93%, 94%, 95%, 96%, 97%, 98%, 99%, or more sequence identity to the reference sequence corresponding to residues 12-231 of an even-numbered SEQ ID NO. of SEQ ID NOs: 374-444, or to the reference sequence corresponding to an even-numbered SEQ ID NO. of SEQ ID NOs: 374-444, wherein the amino acid sequence comprises one or more substitutions relative to the reference sequence corresponding to residues 12-231 of SEQ ID NO: 172, or relative to the reference sequence corresponding to SEQ ID NO: 172.

[0298] In some embodiments, the amino acid sequence of the engineered adenylate kinase comprises at least a substitution or substitution set at amino acid position(s) 66/78, 78/80/224, 78, 65/66, 78/224, 78/80/109, 40/60/94/226, 66/68, 78/80, 94/117/118/226, 68/109, 68, 94/179, 51/66/68/224, 94/117, 51/66/68/78/224, 66, 118, 93/94/180, 109, 68/224, 40/62/93, 93, 51/66, 94/117/118, 198/220, 93/117, 117/118, 93/198, 68/173, 40/117, 224, 40/118/226, 93/94, or 40/62/118, wherein the amino acid positions are relative to the reference sequence corresponding to residues 12-231 of SEQ ID NO: 172, or relative to the reference sequence corresponding to SEQ ID NO: 172.

[0299] In some embodiments, the amino acid sequence of the engineered adenylate kinase comprises at least a substitution or substitution set, or amino acid residue(s) 66E/78G, 78G/80A/224G, 78G, 65P/66E, 78G/224G, 78G/80A/109E, 40F/60S/94S/226I, 66A/68R, 66E/68R, 78G/80A, 94S/117N/118R/226I, 68R/109E, 68R, 94S/179L, 51R/66E/68R/224G, 94S/117N, 51R/66E/68R/78G/224G, 66E, 118R, 93V/94S/180P, 109E, 68R/224G, 40F/62L/93V, 93V, 51R/66E, 94S/117N/118R, 198G/220E, 93V/117N, 117N/118R, 93V/198G, 68R/173R, 40F/117N, 224G, 40F/118R/226I, 93V/94S, or 40F/62L/118R, wherein the amino acid positions are relative to the reference sequence corresponding to residues 12-231 of SEQ ID NO: 172, or relative to the reference sequence corresponding to SEQ ID NO: 172.

[0300] In some embodiments, the amino acid sequence of the engineered adenylate kinase comprises at least a substitution or substitution set I66E/V78G, V78G/E80A/K224G, V78G, E65P/I66E, V78G/K224G, V78G/E80A/F109E, P40F/G60S/G94S/L226I, I66A/E68R, I66E/E68R, V78G/E80A, G94S/Q117N/N118R/L226I, E68R/F109E, E68R, G94S/E179L, I51R/I66E/E68R/K224G, G94S/Q117N, I51R/I66E/E68R/V78G/K224G, I66E, N118R, K93V/G94S/E180P, F109E, E68R/K224G, P40F/K62L/K93V, K93V, I51R/I66E, G94S/Q117N/N118R, D198G/A220E, K93V/Q117N, Q117N/N118R, K93V/D198G, E68R/Q173R, P40F/Q117N, K224G, P40F/N118R/L226I, K93V/G94S, or P40F/K62L/N118R, wherein the amino acid positions are relative to the reference sequence corresponding to residues 12-231 of SEQ ID NO: 172, or relative to the reference sequence corresponding to SEQ ID NO: 172.

[0301] In some embodiments, the engineered adenylate kinase comprises an amino acid sequence having at least 70%, 75%, 80%, 81%, 82%, 83%, 84%, 85%, 86%, 87%, 88%, 89%, 90%, 91%, 92%, 93%, 94%, 95%, 96%, 97%, 98%, 99%, or more sequence identity to the reference sequence corresponding to residues 12-231 of SEQ ID NO: 376, or to the reference sequence corresponding to SEQ ID NO: 376, wherein the amino acid sequence comprises one or more substitutions relative to the reference sequence corresponding to residues 12-231 of SEQ ID NO: 376, or relative to the reference sequence corresponding to SEQ ID NO: 376.

[0302] In some embodiments, the engineered adenylate kinase comprises an amino acid sequence having at least 70%, 75%, 80%, 81%, 82%, 83%, 84%, 85%, 86%, 87%, 88%, 89%, 90%, 91%, 92%, 93%, 94%, 95%, 96%, 97%, 98%, 99%, or more sequence identity to the reference sequence corresponding to residues 12-231 of an even-numbered SEQ ID NO. of SEQ ID NOs: 446-510, or to the reference sequence corresponding to an even-numbered SEQ ID NO. of SEQ ID NOs: 446-510, wherein the amino acid sequence comprises one or more substitutions relative to the reference sequence corresponding to residues 12-231 of SEQ ID NO: 376, or relative to the reference sequence corresponding to SEQ ID NO: 376.

[0303] In some embodiments, the amino acid sequence of the engineered adenylate kinase comprises at least a substitution or substitution set at amino acid position(s) 13, 60, 126, 104, 201, 59, 55, 133, 61, 53, 190, 57, 62, 181, 168, 54, 173, 170, 34, 183, 14, 60/62/124/170, 60/170, or 60/62, wherein the amino acid positions are relative to the reference sequence corresponding to residues 12-231 of SEQ ID NO: 376, or relative to the reference sequence corresponding to SEQ ID NO: 376.

[0304] In some embodiments, the amino acid sequence of the engineered adenylate kinase comprises at least a substitution or substitution set, or amino acid residue(s) 13S, 60A, 126E, 104L, 201S, 59E, 55Q, 133E, 61P, 59M, 13G, 53A, 190A, 57S, 62A, 181V, 55G, 168G, 54R, 54Q, 173R, 168Q, 168N, 170P, 34V, 59H, 183L, 173K, 183A, 14E, 60A/62A/124V/170G, 60A/170G, or 60A/62A, wherein the amino acid positions are relative to the reference sequence corresponding to residues 12-231 of SEQ ID NO: 376, or relative to the reference sequence corresponding to SEQ ID NO: 376.

[0305] In some embodiments, the amino acid sequence of the engineered adenylate kinase comprises at least a substitution or substitution set M13S, G60A, L126E, V104L, G201S, L59E, E55Q, V133E, K61P, L59M, M13G, K53A, L190A, D57S, K62A, T181V, E55G, K168G, K54R, K54Q, Q173R, K168Q, K168N, K170P, Q34V, L59H, R183L, Q173K, R183A, A14E, G60A/K62A/A124V/K170G, G60A/K170G, or G60A/K62A, wherein the amino acid positions are relative to the reference sequence corresponding to residues 12-231 of SEQ ID NO: 376, or relative to the reference sequence corresponding to SEQ ID NO: 376.

[0306] In some embodiments, the engineered adenylate kinase comprises an amino acid sequence having at least 70%, 75%, 80%, 81%, 82%, 83%, 84%, 85%, 86%, 87%, 88%, 89%, 90%, 91%, 92%, 93%, 94%, 95%, 96%, 97%, 98%, 99%, or more sequence identity to the reference sequence corresponding to residues 12-231 of SEQ ID NO: 508, or to the reference sequence corresponding to SEQ ID NO: 508, wherein the amino acid sequence comprises one or more substitutions relative to the reference sequence corresponding to residues 12-231 of SEQ ID NO: 508, or relative to the reference sequence corresponding to SEQ ID NO: 508.

[0307] In some embodiments, the engineered adenylate kinase comprises an amino acid sequence having at least 70%, 75%, 80%, 81%, 82%, 83%, 84%, 85%, 86%, 87%, 88%, 89%, 90%, 91%, 92%, 93%, 94%, 95%, 96%, 97%, 98%, 99%, or more sequence identity to the reference sequence corresponding to residues 12-231 of an even-numbered SEQ ID NO. of SEQ ID NOs: 512-580, or to the reference sequence corresponding to an even-numbered SEQ ID NO. of SEQ ID NOs: 512-580, wherein the amino acid sequence comprises one or more substitutions relative to the reference sequence corresponding to residues 12-231 of SEQ ID NO: 508, or relative to the reference sequence corresponding to SEQ ID NO: 508.

[0308] In some embodiments, the amino acid sequence of the engineered adenylate kinase comprises at least a substitution or substitution set at amino acid position(s) 15, 15/68, 15/181, 13/15, 13/15/201, 54/55, 55/133, 55/133/197, 54/55/133/197, 68, 54/133/197, 54/197, 13/15/68, 34, 54, 133, 120, 34/133, 13/15/181, 55, 15/59, 68/181, 201, 181, 66, 15/59/181, 197, 13/15/59, 61, 34/61, 13, 34/69, or 163, wherein the amino acid positions are relative to the reference sequence corresponding to residues 12-231 of SEQ ID NO: 508, or relative to the reference sequence corresponding to SEQ ID NO: 508.

[0309] In some embodiments, the amino acid sequence of the engineered adenylate kinase comprises at least a substitution or substitution set, or amino acid residue(s) 15F, 15F/68A, 15F/181V, 13S/15F, 13S/15F/2015, 54Q/55Q, 55Q/133E, 55Q/133E/197A, 54Q/55Q/133E/197A, 68A, 54Q/133E/197A, 54Q/197A, 13S/15F/68Y, 34V, 54Q, 133E, 120K, 34V/133A, 13S/15F/181V, 55Q, 15F/59M, 68A/181V, 201S, 68Y, 181V, 66S, 15F/59M/181V, 197A, 13S/15F/59M, 61S, 34V/615, 13S, 61A, 34V/69R, or 163S, wherein the amino acid positions are relative to the reference sequence corresponding to residues 12-231 of SEQ ID NO: 508, or relative to the reference sequence corresponding to SEQ ID NO: 508.

[0310] In some embodiments, the amino acid sequence of the engineered adenylate kinase comprises at least a substitution or substitution set Y15F, Y15F/E68A, Y15F/T181V, M13S/Y15F, M13S/Y15F/G201S, K54Q/E55Q, E55Q/V133E, E55Q/V133E/I197A, K54Q/E55Q/V133E/I197A, E68A, K54Q/V133E/I197A, K54Q/I197A, M13S/Y15F/E68Y, Q34V, K54Q, V133E, Q120K, Q34V/V133A, M13S/Y15F/T181V, E55Q, Y15F/L59M, E68A/T181V, G201S, E68Y, T181V, I66S, Y15F/L59M/T181V, I197A, M13S/Y15F/L59M, K61S, Q34V/K61S, M13S, K61A, Q34V/K69R, or L163S, wherein the amino acid positions are relative to the reference sequence corresponding to residues 12-231 of SEQ ID NO: 508, or relative to the reference sequence corresponding to SEQ ID NO: 508.

[0311] In some embodiments, the engineered adenylate kinase comprises an amino acid sequence having at least 70%, 75%, 80%, 81%, 82%, 83%, 84%, 85%, 86%, 87%, 88%, 89%, 90%, 91%, 92%, 93%, 94%, 95%, 96%, 97%, 98%, 99%, or more sequence identity to the reference sequence corresponding to residues 12-231 of SEQ ID NO: 524, or to the reference sequence corresponding to SEQ ID NO: 524, wherein the amino acid sequence comprises one or more substitutions relative to the reference sequence corresponding to residues 12-231 of SEQ ID NO: 524, or relative to the reference sequence corresponding to SEQ ID NO: 524.

[0312] In some embodiments, the engineered adenylate kinase comprises an amino acid sequence having at least 70%, 75%, 80%, 81%, 82%, 83%, 84%, 85%, 86%, 87%, 88%, 89%, 90%, 91%, 92%, 93%, 94%, 95%, 96%, 97%, 98%, 99%, or more sequence identity to the reference sequence corresponding to residues 12-231 of an even-numbered SEQ ID NO. of SEQ ID NOs: 582-608, or to the reference sequence corresponding to an even-numbered SEQ ID NO. of SEQ ID NOs: 582-608, wherein the amino acid sequence comprises one or more substitutions relative to the reference sequence corresponding to residues 12-231 of SEQ ID NO: 524, or relative to the reference sequence corresponding to SEQ ID NO: 524.

[0313] In some embodiments, the amino acid sequence of the engineered adenylate kinase comprises at least a substitution or substitution set at amino acid position(s) 120, 61/201, 34, 36, 105, 112, 31, or 146, wherein the amino acid positions are relative to the reference sequence corresponding to residues 12-231 of SEQ ID NO: 524, or relative to the reference sequence corresponding to SEQ ID NO: 524.

[0314] In some embodiments, the amino acid sequence of the engineered adenylate kinase comprises at least a substitution or substitution set, or amino acid residue(s) 120R, 61S/201S, 34S, 36I, 36V, 36A, 36L, 36M, 105S, 34A, 112E, 31R, 146D, or 112R, wherein the amino acid positions are relative to the reference sequence corresponding to residues 12-231 of SEQ ID NO: 524, or relative to the reference sequence corresponding to SEQ ID NO: 524.

[0315] In some embodiments, the amino acid sequence of the engineered adenylate kinase comprises at least a substitution or substitution set Q120R, K61S/G201S, Q34S, K36I, K36V, K36A, K36L, K36M, A105S, Q34A, S112E, K31R, K146D, or S112R, wherein the amino acid positions are relative to the reference sequence corresponding to residues 12-231 of SEQ ID NO: 524, or relative to the reference sequence corresponding to SEQ ID NO: 524.

[0316] In some embodiments, the engineered adenylate kinase comprises an amino acid sequence having at least 70%, 75%, 80%, 81%, 82%, 83%, 84%, 85%, 86%, 87%, 88%, 89%, 90%, 91%, 92%, 93%, 94%, 95%, 96%, 97%, 98%, 99%, or more sequence identity to the reference sequence corresponding to residues 12-231 of SEQ ID NO: 584, or to the reference sequence corresponding to SEQ ID NO: 584, wherein the amino acid sequence comprises one or more substitutions relative to the reference sequence corresponding to residues 12-231 of SEQ ID NO: 584, or relative to the reference sequence corresponding to SEQ ID NO: 584.

[0317] In some embodiments, the engineered adenylate kinase comprises an amino acid sequence having at least 70%, 75%, 80%, 81%, 82%, 83%, 84%, 85%, 86%, 87%, 88%, 89%, 90%, 91%, 92%, 93%, 94%, 95%, 96%, 97%, 98%, 99%, or more sequence identity to the reference sequence corresponding to residues 12-231 of an even-numbered SEQ ID NO. of SEQ ID NOs: 610-666, or to the reference sequence corresponding to an even-numbered SEQ ID NO. of SEQ ID NOs: 610-666, wherein the amino acid sequence comprises one or more substitutions relative to the reference sequence corresponding to residues 12-231 of SEQ ID NO: 584, or relative to the reference sequence corresponding to SEQ ID NO: 584.

[0318] In some embodiments, the amino acid sequence of the engineered adenylate kinase comprises at least a substitution or substitution set at amino acid position(s) 13/30/31/53/109/119/168, 36/126/190, 126, 36/39/126, 126/190, 36/126, 36/190, 39/126, 13/109/119, 109, 36/120/190, 126/148, 190, 108/126, 30/31, 13/118/182, 31/53, 39, 119, 13/119/168, 53/168, 34, 34/65/146, 36/39, 119/168, 34/112, or 173, wherein the amino acid positions are relative to the reference sequence corresponding to residues 12-231 of SEQ ID NO: 584, or relative to the reference sequence corresponding to SEQ ID NO: 584.

[0319] In some embodiments, the amino acid sequence of the engineered adenylate kinase comprises at least a substitution or substitution set, or amino acid residue(s) 13G/30G/31R/53A/109Y/119R/168G, 36Y/126E/190A, 126E, 36Q/39M/126E, 126E/190A, 36Y/39M/126E, 36Q/126E, 36Y/190A, 39M/126E, 13G/109Y/119R, 109Y, 36Y/120G/190A, 126E/148T, 190A, 108R/126E, 30G/31R, 13G/118A/182I, 31R/53A, 39M, 119R, 13G/119R/168G, 53A/168G, 34S, 34S/65A/146D, 36Q/39M, 119R/168G, 34S/112R, 36Y/39M, or 173K, wherein the amino acid positions are relative to the reference sequence corresponding to residues 12-231 of SEQ ID NO: 584, or relative to the reference sequence corresponding to SEQ ID NO: 584.

[0320] In some embodiments, the amino acid sequence of the engineered adenylate kinase comprises at least a substitution or substitution set M13G/S30G/K31R/K53A/F109Y/K119R/K168G, K36Y/L126E/L190A, L126E, K36Q/I39M/L126E, L126E/L190A, K36Y/I39M/L126E, K36Q/L126E, K36Y/L190A, I39M/L126E, M13G/F109Y/K119R, F109Y, K36Y/Q120G/L190A, L126E/G148T, L190A, E108R/L126E, S30G/K31R, M13G/N118A/V182I, K31R/K53A, I39M, K119R, M13G/K119R/K168G, K53A/K168G, Q34S, Q34S/E65A/K146D, K36Q/I39M, K119R/K168G, Q34S/S112R, K36Y/I39M, or Q173K, wherein the amino acid positions are relative to the reference sequence corresponding to residues 12-231 of SEQ ID NO: 584, or relative to the reference sequence corresponding to SEQ ID NO: 584.

[0321] In some embodiments, the engineered adenylate kinase comprises an amino acid sequence having at least 70%, 75%, 80%, 81%, 82%, 83%, 84%, 85%, 86%, 87%, 88%, 89%, 90%, 91%, 92%, 93%, 94%, 95%, 96%, 97%, 98%, 99%, or more sequence identity to the reference sequence corresponding to residues 12-231 of SEQ ID NO: 610, or to the reference sequence corresponding to SEQ ID NO: 610, wherein the amino acid sequence comprises one or more substitutions relative to the reference sequence corresponding to residues 12-231 of SEQ ID NO: 610, or relative to the reference sequence corresponding to SEQ ID NO: 610.

[0322] In some embodiments, the engineered adenylate kinase comprises an amino acid sequence having at least 70%, 75%, 80%, 81%, 82%, 83%, 84%, 85%, 86%, 87%, 88%, 89%, 90%, 91%, 92%, 93%, 94%, 95%, 96%, 97%, 98%, 99%, or more sequence identity to the reference sequence corresponding to residues 12-231 of an even-numbered SEQ ID NO. of SEQ ID NOs: 668-780, or to the reference sequence corresponding to an even-numbered SEQ ID NO. of SEQ ID NOs: 668-780, wherein the amino acid sequence comprises one or more substitutions relative to the reference sequence corresponding to residues 12-231 of SEQ ID NO: 610, or relative to the reference sequence corresponding to SEQ ID NO: 610.

[0323] In some embodiments, the amino acid sequence of the engineered adenylate kinase comprises at least a substitution or substitution set at amino acid position(s) 190, 115/126/190, 126/190, 34/35/105, 126, 59/126, 34/105/116/146, 48, 66, 59, 148, 82, 100, 27, 135, 77, 138, 52, 68, 139, 184, 81, 65, 153, 50, 181, 214, 172, 69, or 154, wherein the amino acid positions are relative to the reference sequence corresponding to residues 12-231 of SEQ ID NO: 610, or relative to the reference sequence corresponding to SEQ ID NO: 610.

[0324] In some embodiments, the amino acid sequence of the engineered adenylate kinase comprises at least a substitution or substitution set, or amino acid residue(s) 190A, 115K/126E/190A, 126E/190A, 34S/35A/105R, 126E, 59E/126E, 34S/105R/116E/146D, 48L, 66F, 59T, 148H, 82T, 59V, 59Y, 59P, 100F, 148F, 27S, 135R, 148T, 77M, 138C, 148Q, 126A, 52A, 66Q, 59W, 59G, 148M, 59M, 135S, 68L, 139A, 184I, 68R, 184V, 66S, 68Q, 81I, 68V, 65F, 153S, 126V, 68A, 66T, 50C, 138V, 181I, 214T, 139L, 68T, 148S, 172H, 138I, 69L, 81Q, or 154R, wherein the amino acid positions are relative to the reference sequence corresponding to residues 12-231 of SEQ ID NO: 610, or relative to the reference sequence corresponding to SEQ ID NO: 610.

[0325] In some embodiments, the amino acid sequence of the engineered adenylate kinase comprises at least a substitution or substitution set L190A, E115K/L126E/L190A, L126E/L190A, Q34S/E35A/A105R, L126E, L59E/L126E, Q34S/A105R/S116E/K146D, F48L, I66F, L59T, G148H, V82T, L59V, L59Y, L59P, Y100F, G148F, G27S, V135R, G148T, L77M, L138C, G148Q, L126A, V52A, I66Q, L59W, L59G, G148M, L59M, V135S, E68L, T139A, H184I, E68R, H184V, I66S, E68Q, V81I, E68V, E65F, M153S, L126V, E68A, I66T, D50C, L138V, T181I, G214T, T139L, E68T, G148S, V172H, L138I, K69L, V81Q, or I154R, wherein the amino acid positions are relative to the reference sequence corresponding to residues 12-231 of SEQ ID NO: 610, or relative to the reference sequence corresponding to SEQ ID NO: 610.

[0326] In some embodiments, the engineered adenylate kinase comprises an amino acid sequence having at least 70%, 75%, 80%, 81%, 82%, 83%, 84%, 85%, 86%, 87%, 88%, 89%, 90%, 91%, 92%, 93%, 94%, 95%, 96%, 97%, 98%, 99%, or more sequence identity to the reference sequence corresponding to residues 12-231 of SEQ ID NO: 674, or to the reference sequence corresponding to SEQ ID NO: 674, wherein the amino acid sequence comprises one or more substitutions relative to the reference sequence corresponding to residues 12-231 of SEQ ID NO: 674, or relative to the reference sequence corresponding to SEQ ID NO: 674.

[0327] In some embodiments, the engineered adenylate kinase comprises an amino acid sequence having at least 70%, 75%, 80%, 81%, 82%, 83%, 84%, 85%, 86%, 87%, 88%, 89%, 90%, 91%, 92%, 93%, 94%, 95%, 96%, 97%, 98%, 99%, or more sequence identity to the reference sequence corresponding to residues 12-231 of an even-numbered SEQ ID NO. of SEQ ID NOs: 782-868, or to the reference sequence corresponding to an even-numbered SEQ ID NO. of SEQ ID NOs: 782-868, wherein the amino acid sequence comprises one or more substitutions relative to the reference sequence corresponding to residues 12-231 of SEQ ID NO: 674, or relative to the reference sequence corresponding to SEQ ID NO: 674.

[0328] In some embodiments, the amino acid sequence of the engineered adenylate kinase comprises at least a substitution or substitution set at amino acid position(s) 81/148/219, 68/148/219, 68/81/219, 148/219, 81/219, 136/138/139, 68/219, 66/68/219, 66/148/219, 66/68/148, 59, 59/135, 219, 59/139, 138, 126/148/219, 59/181, 81, 66/81/219, 126/219, 66/68/81/148/219, 181, 27/148, 135/136/139, 148, 59/135/138/181, 59/135/136/138/139, 59/135/136/138/181, 27, 27/126/148, 135/136/138, 68/81/126/148/219, 136, 68, 126/148, or 138/139, wherein the amino acid positions are relative to the reference sequence corresponding to residues 12-231 of SEQ ID NO: 674, or relative to the reference sequence corresponding to SEQ ID NO: 674.

[0329] In some embodiments, the amino acid sequence of the engineered adenylate kinase comprises at least a substitution or substitution set, or amino acid residue(s) 81I/148T/219L, 68A/148H/219L, 68A/81I/219L, 148H/219F, 68A/148T/219L, 81I/219L, 136L/138V/139L, 148T/219F, 148H/219L, E68A/V219L, 66T/68A/219L, 66Q/148H/219F, 148T/219L, 66T/68A/148H, 59V, 59V/135R, 219F, 59V/139L, 138V, 126A/148T/219L, 59V/181I, 81I, 66Q/81I/219L, 219L, 126A/219L, 66Q/68A/81I/148T/219L, 181I, 27S/148H, 135R/136L/139R, 136L/138V/139R, 148T, 59V/135R/138V/181I, 59V/135R/136L/138V/139R, 59V/135R/136L/138V/181I, 66Q/68G/81I/148H/219L, 27S, 27S/126A/148T, 135R/136L/138V, 68G/81I/126A/148H/219L, 136L, 27S/126A/148H, 68G, 126A/148T, or 138V/139R, wherein the amino acid positions are relative to the reference sequence corresponding to residues 12-231 of SEQ ID NO: 674, or relative to the reference sequence corresponding to SEQ ID NO: 674.

[0330] In some embodiments, the amino acid sequence of the engineered adenylate kinase comprises at least a substitution or substitution set V81I/G148T/V219L, E68A/G148H/V219L, E68A/V81I/V219L, G148H/V219F, E68A/G148T/V219L, V81I/V219L, Q136L/L138V/T139L, G148T/V219F, G148H/V219L, E68A/V219L, I66T/E68A/V219L, I66Q/G148H/V219F, G148T/V219L, I66T/E68A/G148H, L59V, L59V/V135R, V219F, L59V/T139L, L138V, L126A/G148T/V219L, L59V/T181I, V81I, I66Q/V81I/V219L, V219L, L126A/V219L, I66Q/E68A/V81I/G148T/V219L, T181I, G27S/G148H, V135R/Q136L/T139R, Q136L/L138V/T139R, G148T, L59V/V135R/L138V/T181I, L59V/V135R/Q136L/L138V/T139R, L59V/V135R/Q136L/L138V/T181I, I66Q/E68G/V81I/G148H/V219L, G27S, G27S/L126A/G148T, V135R/Q136L/L138V, E68G/V81I/L126A/G148H/V219L, Q136L, G27S/L126A/G148H, E68G, L126A/G148T, or L138V/T139R, wherein the amino acid positions are relative to the reference sequence corresponding to residues 12-231 of SEQ ID NO: 674, or relative to the reference sequence corresponding to SEQ ID NO: 674.

[0331] In some embodiments, the engineered adenylate kinase comprises an amino acid sequence having at least 70%, 75%, 80%, 81%, 82%, 83%, 84%, 85%, 86%, 87%, 88%, 89%, 90%, 91%, 92%, 93%, 94%, 95%, 96%, 97%, 98%, 99%, or more sequence identity to the reference sequence corresponding to residues 12-231 of SEQ ID NO: 816, or to the reference sequence corresponding to SEQ ID NO: 816, wherein the amino acid sequence comprises one or more substitutions relative to the reference sequence corresponding to residues 12-231 of SEQ ID NO: 816, or relative to the reference sequence corresponding to SEQ ID NO: 816.

[0332] In some embodiments, the engineered adenylate kinase comprises an amino acid sequence having at least 70%, 75%, 80%, 81%, 82%, 83%, 84%, 85%, 86%, 87%, 88%, 89%, 90%, 91%, 92%, 93%, 94%, 95%, 96%, 97%, 98%, 99%, or more sequence identity to the reference sequence corresponding to residues 12-231 of an even-numbered SEQ ID NO. of SEQ ID NOs: 870-1014, or to the reference sequence corresponding to an even-numbered SEQ ID NO. of SEQ ID NOs: 870-1014, wherein the amino acid sequence comprises one or more substitutions relative to the reference sequence corresponding to residues 12-231 of SEQ ID NO: 816, or relative to the reference sequence corresponding to SEQ ID NO: 816.

[0333] In some embodiments, the amino acid sequence of the engineered adenylate kinase comprises at least a substitution or substitution set at amino acid position(s) 48/100/148, 48/66/148/219, 48/100, 48/100/135/136, 48/66/77/100/135/136/148, 48/100/136, 48/135/148, 48/148, 48/136/148, 48/135, 48/135/136, 66/100, 48/66/219, 48/135/219, 100/148, 48/136/219, 48/219, 48/135/148/219, 100/135/136, 100/136, 66/77/100/136/219, 100/135, 48/77/100/135/136, 100, 77/100/135, 48/66/100/135/136/148/219, 52/184, 66, 52/68, 136/148, 126/184, 148, 184, 52, 135/136/148, 126/138/184, 27/184, 27/126, 27/126/148, 27, 27/126/184, 66/100/135/219, 27/68, 52/68/81/126, 48/66/136/148, 66/136/148, 66/135, 66/136, 66/135/219, 136, 135/148/219, 68/126, 66/148/219, 27/68/126, 27/68/184, 126, 68/81/126, 77/135, 135/136, 77/136, 77/148, 82, 138/184, 77/135/136, 27/138, 81, 81/126, 27/126/138, 68, or 81/138, wherein the amino acid positions are relative to the reference sequence corresponding to residues 12-231 of SEQ ID NO: 816, or relative to the reference sequence corresponding to SEQ ID NO: 816.

[0334] In some embodiments, the amino acid sequence of the engineered adenylate kinase comprises at least a substitution or substitution set, or amino acid residue(s) 48L/100F/148H, 48L/66F/148F/219L, 48L/100F, 48L/100F/135R/136L, 48L/66F/77M/100F/135R/136L/148H, 48L/100F/136L, 48L/135R/148F, 48L/148F, 48L/136L/148F, 48L/135R, 48L/135R/136L, 66F/100F, 48L/66Q/219L, 48L/135R/219L, 100F/148H, 48L/136L/219L, 48L/219L, 48L/135R/148F/219L, 100F/135R/136L, 100F/136L, 66F/77M/100F/136L/219L, 100F/135R, 48L/77M/100F/135R/136L, 100F, 77M/100F/135R, 48L/66F/100F/135R/136L/148F/219L, 52A/184I, 66F, 52A/68L, 136L/148F, 126A/184I, 148F, 126A/184V, 184V, 52A, 135R/136L/148F, 126A/138V/184V, 184I, 27S/184V, 27S/126A, 27S/126A/148R, 27S, 27S/126A/184V, 66Q/100F/135R/219L, 27S/68A, 52A/68A/81L/126A, 66Q, 48L/66Q/136L/148F, 66F/136L/148H, 66Q/135R, 66Q/136L, 66F/135R/219L, 136L, 135R/148F/219L, 68A/126A, 66F/148H/219L, 27S/68L/126A, 27S/68L/184V, 126A, 68L/81L/126A, 77M/135R, 135R/136L, 77M/136L, 77M/148F, 82T, 138V/184V, 77M/135R/136L, 27S/138V, 81L, 81L/126A, 27S/126A/138V, 68A, or 81L/138V, wherein the amino acid positions are relative to the reference sequence corresponding to residues 12-231 of SEQ ID NO: 816, or relative to the reference sequence corresponding to SEQ ID NO: 816.

[0335] In some embodiments, the amino acid sequence of the engineered adenylate kinase comprises at least a substitution or substitution set F48L/Y100F/G148H, F48L/I66F/G148F/V219L, F48L/Y100F, F48L/Y100F/V135R/Q136L, F48L/I66F/L77M/Y100F/V135R/Q136L/G148H, F48L/Y100F/Q136L, F48L/V135R/G148F, F48L/G148F, F48L/Q136L/G148F, F48L/V135R, F48L/V135R/Q136L, I66F/Y100F, F48L/I66Q/V219L, F48L/V135R/V219L, Y100F/G148H, F48L/Q136L/V219L, F48L/V219L, F48L/V135R/G148F/V219L, Y100F/V135R/Q136L, Y100F/Q136L, I66F/L77M/Y100F/Q136L/V219L, Y100F/V135R, F48L/L77M/Y100F/V135R/Q136L, Y100F, L77M/Y100F/V135R, F48L/I66F/Y100F/V135R/Q136L/G148F/V219L, V52A/H184I, I66F, V52A/E68L, Q136L/G148F, L126A/H184I, G148F, L126A/H184V, H184V, V52A, V135R/Q136L/G148F, L126A/L138V/H184V, H184I, G27S/H184V, G27S/L126A, G27S/L126A/G148R, G27S, G27S/L126A/H184V, I66Q/Y100F/V135R/V219L, G27S/E68A, V52A/E68A/V81L/L126A, I66Q, F48L/I66Q/Q136L/G148F, I66F/Q136L/G148H, I66Q/V135R, I66Q/Q136L, I66F/V135R/V219L, Q136L, V135R/G148F/V219L, E68A/L126A, I66F/G148H/V219L, G27S/E68L/L126A, G27S/E68L/H184V, L126A, E68L/V81L/L126A, L77M/V135R, V135R/Q136L, L77M/Q136L, L77M/G148F, V82T, L138V/H184V, L77M/V135R/Q136L, G27S/L138V, V81L, V81L/L126A, G27S/L126A/L138V, E68A, or V81L/L138V, wherein the amino acid positions are relative to the reference sequence corresponding to residues 12-231 of SEQ ID NO: 816, or relative to the reference sequence corresponding to SEQ ID NO: 816.

[0336] In some embodiments, the engineered adenylate kinase comprises an amino acid sequence having at least 70%, 75%, 80%, 81%, 82%, 83%, 84%, 85%, 86%, 87%, 88%, 89%, 90%, 91%, 92%, 93%, 94%, 95%, 96%, 97%, 98%, 99%, or more sequence identity to the reference sequence corresponding to residues 12-231 of SEQ ID NO: 874, or to the reference sequence corresponding to SEQ ID NO: 874, wherein the amino acid sequence comprises one or more substitutions relative to the reference sequence corresponding to residues 12-231 of SEQ ID NO: 874, or relative to the reference sequence corresponding to SEQ ID NO: 874.

[0337] In some embodiments, the engineered adenylate kinase comprises an amino acid sequence having at least 70%, 75%, 80%, 81%, 82%, 83%, 84%, 85%, 86%, 87%, 88%, 89%, 90%, 91%, 92%, 93%, 94%, 95%, 96%, 97%, 98%, 99%, or more sequence identity to the reference sequence corresponding to residues 12-231 of an even-numbered SEQ ID NO. of SEQ ID NOs: 1016-1302, or to the reference sequence corresponding to an even-numbered SEQ ID NO. of SEQ ID NOs: 1016-1302, wherein the amino acid sequence comprises one or more substitutions relative to the reference sequence corresponding to residues 12-231 of SEQ ID NO: 874, or relative to the reference sequence corresponding to SEQ ID NO: 874.

[0338] In some embodiments, the amino acid sequence of the engineered adenylate kinase comprises at least a substitution or substitution set at amino acid position(s) 32/60/135/175/225, 32/81/127/128/135/175/225, 83/175/225, 135/175/225, 54/84/190, 55/190/212, 32/60/81/83/127/128/135/225, 175/225, 32/127/175, 84/190/212, 32/128/175, 81/175, 21/54, 54/55/212, 32/175/225, 128/175/225, 62/84/190, 81/135/225, 21/54/62/190/212, 60/81/83/175, 55/84/190, 32/81/83/135/225, 175, 62/212, 32/81/83, 32/81/225, 54/55/84/212, 55/190, 62/179, 54/84/179/212, 54/55/62/84, 81/135, 32/81/135, 179/190/212, 55/62, 100, 21/54/62/190, 190/212, 128/175, 21/62/190, 54/179/190, 54/190, 21/55/190, 21/54/62, 21/84, 21/55, 21/62, 21/179, 55/62/190/212, 54/62/84, 127/128/175/225, 54/62, 100/104, 54/55, 21/55/212, 62, 55/84, 55/62/212, 21/84/190, 225, 21/54/179/190, 83/135, 32/175, 21/54/78/190, 55/62/179/190/212, 21/54/190, 21/55/84/190, 62/84, 21/55/62, 21/62/84, 135, 32/60/81/127, 21/54/55/62/78, 54/84, 55/62/179/190, 54/55/62/84/179/190/212, 190, 83, 78, 54/62/190, 21/55/62/179/190, 32/60/127, 54/62/84/190/212, 21/62/179, 127/128/225, 32/225, 32/60/81, 81, 54, 21, 60/81/128/175, 84, 21/190/212, 60/128/225, 179, 21/55/62/190, 128, 60, 212, 55, 127, 32, 80, 220, 62/78/179, 55/62/84, 21/55/190/212, 32/127/128/225, 21/54/55/84/179, 21/190, 32/60/81/83/128/135, 127/128, or 21/55/179, wherein the amino acid positions are relative to the reference sequence corresponding to residues 12-231 of SEQ ID NO: 874, or relative to the reference sequence corresponding to SEQ ID NO: 874.

[0339] In some embodiments, the amino acid sequence of the engineered adenylate kinase comprises at least a substitution or substitution set, or amino acid residue(s) 32I/60S/135K/175L/225A, 32I/81L/127I/128N/135K/175L/225A, 83S/175F/225A, 135K/175L/225A, 54T/84H/190R, 55S/190H/212N, 32I/60S/81L/83S/127I/128N/135K/225A, 175F/225A, 32I/127I/175L, 84A/190H/212N, 32I/128N/175F, 81L/175L, 81L/175F, 21R/54T, 54T/55S/212N, 32I/175L/225A, 128N/175F/225A, 62S/84A/190R, 81L/135M/225A, 21R/54T/62S/190R/212N, 60S/81L/83G/175L, 55S/84A/190R, 32I/81L/83G/135K/225A, 175F, 62S/212N, 32I/81L/83S, 32I/81L/225A, 54T/55S/84A/212N, 55S/190R, 62S/179P, 62E/84A/190H, 54T/84A/179P/212N, 54T/55S/62S/84A, 81L/135M, 32I/81L/135K, 179P/190H/212N, 55S/62E, 100Y, 21R/54T/62E/190H, 190H/212N, 128N/175L, 21R/62S/190H, 54T/179P/190H, 54T/190R, 21R/55S/190H, 21R/54T/62E, 21R/84A, 21R/55S, 21R/62S, 21R/179P, 175L, 55S/62E/190H/212N, 54T/62E/84A, 127I/128N/175L/225A, 54T/62E, 100Y/104F, 55S/62E/190R/212N, 54T/555, 21R/55S/212N, 62S, 55S/84A, 55S/62S/212N, 21R/84A/190H, 225A, 21R/54T/179P/190R, 83S/135K, 32I/175L, 21R/54T/78T/190R, 62E, 55S/62E/179P/190H/212N, 81L/135K, 21R/54T/190H, 21R/55S/84A/190H, 62S/84A, 21R/55S/62E, 21R/62S/84A, 135M, 32I/60S/81L/127I, 21R/54T/55S/62E/78T, 100Y/104H, 54T/84A, 55S/62S/179P/190R, 54T/55S/62S/84A/179P/190H/212N, 190R, 190H, 83S, 100Y/104R, 78T, 54T/62E/190R, 21R/55S/62E/179P/190H, 78C, 32I/60S/127I, 54T/62E/84A/190H/212N, 21R/62S/179P, 100Y/104Q, 127I/128N/225A, 32I/225A, 32I/60S/81L, 225V, 81L, 54T, 21R, 60S/81L/128N/175L, 190Q, 84A, 21R/190R/212N, 190C, 135K, 60S/128N/225A, 225T, 62G, 225Q, 179P, 225R, 100Y/1045, 83H, 21R/55S/62E/190R, 100Y/104W, 190G, 128N, 84M, 60S, 78N, 84S, 62L, 128E, 212N, 55S, 127I, 21S, 32I, 80G, 84E, 220V, 62S/78T/179P, 190E, 55S/62E/84A, 21R/55S/190H/212N, 32I/127I/128N/225A, 21R/54T/55S/84A/179P, 21R/190R, 32I/60S/81L/83S/128N/135M, 127I/128N, or 21R/55S/179P, wherein the amino acid positions are relative to the reference sequence corresponding to residues 12-231 of SEQ ID NO: 874, or relative to the reference sequence corresponding to SEQ ID NO: 874.

[0340] In some embodiments, the amino acid sequence of the engineered adenylate kinase comprises at least a substitution or substitution set R32I/A60S/V135K/D175L/I225A, R32I/V81L/F127I/K128N/V135K/D175L/I225A, K83S/D175F/I225A, V135K/D175L/I225A, K54T/R84H/L190R, Q55S/L190H/S212N, R32I/A60S/V81L/K83S/F127I/K128N/V135K/I225A, D175F/I225A, R32I/F127I/D175L, R84A/L190H/S212N, R32I/K128N/D175F, V81L/D175L, V81L/D175F, P21R/K54T, K54T/Q55S/S212N, R32I/D175L/I225A, K128N/D175F/I225A, K62S/R84A/L190R, V81L/V135M/I225A, P21R/K54T/K62S/L190R/S212N, A60S/V81L/K83G/D175L, Q55S/R84A/L190R, R32I/V81L/K83G/V135K/I225A, D175F, K62S/S212N, R32I/V81L/K83S, R32I/V81L/I225A, K54T/Q55S/R84A/S212N, Q55S/L190R, K62S/E179P, K62E/R84A/L190H, K54T/R84A/E179P/S212N, K54T/Q55S/K62S/R84A, V81L/V135M, R32I/V81L/V135K, E179P/L190H/S212N, Q55S/K62E, F100Y, P21R/K54T/K62E/L190H, L190H/S212N, K128N/D175L, P21R/K62S/L190H, K54T/E179P/L190H, K54T/L190R, P21R/Q55S/L190H, P21R/K54T/K62E, P21R/R84A, P21R/Q55S, P21R/K62S, P21R/E179P, D175L, Q55S/K62E/L190H/S212N, K54T/K62E/R84A, F127I/K128N/D175L/I225A, K54T/K62E, F100Y/V104F, Q55S/K62E/L190R/S212N, K54T/Q55S, P21R/Q55S/S212N, K62S, Q55S/R84A, Q55S/K62S/S212N, P21R/R84A/L190H, I225A, P21R/K54T/E179P/L190R, K83S/V135K, R32I/D175L, P21R/K54T/G78T/L190R, K62E, Q55S/K62E/E179P/L190H/S212N, V81L/V135K, P21R/K54T/L190H, P21R/Q55S/R84A/L190H, K62S/R84A, P21R/Q55S/K62E, P21R/K62S/R84A, V135M, R32I/A60S/V81L/F127I, P21R/K54T/Q55S/K62E/G78T, F100Y/V104H, K54T/R84A, Q55S/K62S/E179P/L190R, K54T/Q55S/K62S/R84A/E179P/L190H/S212N, L190R, L190H, K83S, F100Y/V104R, G78T, K54T/K62E/L190R, P21R/Q55S/K62E/E179P/L190H, G78C, R32I/A60S/F127I, K54T/K62E/R84A/L190H/S212N, P21R/K62S/E179P, F100Y/V104Q, F127I/K128N/I225A, R32I/I225A, R32I/A60S/V81L, I225V, V81L, K54T, P21R, A60S/V81L/K128N/D175L, L190Q, R84A, P21R/L190R/S212N, L190C, V135K, A60S/K128N/I225A, I225T, K62G, I225Q, E179P, I225R, F100Y/V104S, K83H, P21R/Q55S/K62E/L190R, F100Y/V104W, L190G, K128N, R84M, A60S, G78N, R84S, K62L, K128E, S212N, Q55S, F127I, P21S, R32I, A80G, R84E, A220V, K62S/G78T/E179P, L190E, Q55S/K62E/R84A, P21R/Q55S/L190H/S212N, R32I/F127I/K128N/I225A, P21R/K54T/Q55S/R84A/E179P, P21R/L190R, R32I/A60S/V81L/K83S/K128N/V135M, F127I/K128N, or P21R/Q55S/E179P, wherein the amino acid positions are relative to the reference sequence corresponding to residues 12-231 of SEQ ID NO: 874, or relative to the reference sequence corresponding to SEQ ID NO: 874.

[0341] In some embodiments, the engineered adenylate kinase comprises an amino acid sequence having at least 70%, 75%, 80%, 81%, 82%, 83%, 84%, 85%, 86%, 87%, 88%, 89%, 90%, 91%, 92%, 93%, 94%, 95%, 96%, 97%, 98%, 99%, or more sequence identity to the reference sequence corresponding to residues 12-231 of SEQ ID NO: 1032, or to the reference sequence corresponding to SEQ ID NO: 1032, wherein the amino acid sequence comprises one or more substitutions relative to the reference sequence corresponding to residues 12-231 of SEQ ID NO: 1032, or relative to the reference sequence corresponding to SEQ ID NO: 1032.

[0342] In some embodiments, the engineered adenylate kinase comprises an amino acid sequence having at least 70%, 75%, 80%, 81%, 82%, 83%, 84%, 85%, 86%, 87%, 88%, 89%, 90%, 91%, 92%, 93%, 94%, 95%, 96%, 97%, 98%, 99%, or more sequence identity to the reference sequence corresponding to residues 12-231 of an even-numbered SEQ ID NO. of SEQ ID NOs: 1356-1552, or to the reference sequence corresponding to an even-numbered SEQ ID NO. of SEQ ID NOs: 1356-1552, wherein the amino acid sequence comprises one or more substitutions relative to the reference sequence corresponding to residues 12-231 of SEQ ID NO: 1032, or relative to the reference sequence corresponding to SEQ ID NO: 1032.

[0343] In some embodiments, the amino acid sequence of the engineered adenylate kinase comprises at least a substitution or substitution set at amino acid position(s) 54/80/225, 55/80/180, 54/55/80/208/225, 84/128/155/190/212, 62/155/190, 83/84/155/190, 62/128/135/190, 225, 84/155/190, 128/190, 190/212, 83/84/155, 54/208/225, 84/155/190, 84/212, 84/123/155/212, 62/128/190, 55/80/208/225, 155/190, 83/84/190/212, 83/128/155/190/212, 55/180/225, 84/190/212, 54/80/180/208/225, 80/208, 135/155/190, 212, 80/180/208, 128/135/190/212, 128/155/212, 80/208/225, 83/212, 62/84/155/190, 54/179/225, 84, 83/84/190, 128/212, 54/55/80/208, 55, 62/128, 54/80/208/225, 62/83/84/190, 179/225, 190, 80/169/208, 62/128/212, 80, 62, 54/55/80/225, 54/80/180/208, 83/84/128/190/212, 62/83/190, 62/190, 80/179, 80/180, 54/80, 62/83/84/128/190/212, 83/84/135/212, 54/80/179/208, 62/84/128, 11/62/84/128/190/212, 80/179/208, 80/225, 62/84/128/190/212, 62/84/212, 80/179/180/208/225, 62/135, 55/208, 62/84, 128/135/190, 55/208/225, 84/128/190, 62/84/128/190, 62/135/212, 54/179/180/225, 62/84/135/212, 135, 54/55/225, 55/80/179/180, 84/135/190, 84/128, 54, 84/128/135, 54/179/208/225, 55/179/225, 128, 62/83/84/155/190, 84/135, 84/128/155, 55/179/180, 83/84/128/190, or 54/55/179/225, wherein the amino acid positions are relative to the reference sequence corresponding to residues 12-231 of SEQ ID NO: 1032, or relative to the reference sequence corresponding to SEQ ID NO: 1032.

[0344] In some embodiments, the amino acid sequence of the engineered adenylate kinase comprises at least a substitution or substitution set, or amino acid residue(s) 54T/80D/225A, 55S/80D/180H, 54T/55S/80D/208E/225L, 84M/128E/155T/190R/212N, 62S/155T/190H, 83T/84M/155T/190H, 62S/128E/135K/190H, 225A, 84M/155T/190R, 128E/190R, 190R/212N, 83T/84M/155T, 54T/208E/225A, 84M/155T/190H, 84H/212N, 84M/123S/155T/212N, 62S/128E/190R, 55S/80D/208E/225A, 155T/190R, 83T/84M/190R/212N, 83T/128E/155T/190H/212N, 55S/180H/225A, 84M/190R/212N, 54T/80D/180H/208E/225A, 80D/208E, 135K/155T/190R, 212N, 80D/180H/208E, 128E/135K/190R/212N, 128E/155T/212N, 80D/208E/225L, 83T/212N, 62S/84M/155T/190R, 54T/179V/225A, 84H, 83T/84M/190R, 128E/212N, 54T/55S/80D/208E, 190H/212N, 55S, 62S/128E, 54T/80D/208E/225A, 62S/83T/84M/190R, 179A/225A, 190R, 80D/169D/208E, 62S/128E/212N, 80D, 62S, 54T/55S/80D/225L, 54T/80D/180H/208E, 83T/84M/128E/190H/212N, 62S/83T/190R, 179V/225A, 62S/190R, 80D/179V, 80D/180H, 54T/80D, 62S/83T/84H/128E/190H/212N, 83T/84M/135K/212N, 54T/80D/179A/208E, 62S/84H/128E, 11D/62S/84M/128E/190H/212N, 80D/179V/208E, 80D/225A, 62S/84M/128E/190H/212N, 62S/84H/212N, 80D/179V/180H/208E/225L, 62S/135K, 55S/208E, 62S/84H, 128E/135K/190H, 55S/208E/225A, 190H, 84H/128E/190H, 62S/84H/128E/190R, 62S/135K/212N, 54T/179V/180H/225A, 128E/190H, 62S/84M/135K/212N, 135K, 54T/55S/225L, 55S/80D/179V/180H, 62S/84M/212N, 84M/135K/190R, 84M/128E, 54T, 84M/128E/135K, 54T/179A/208E/225A, 55S/179V/225L, 128E, 62S/83T/84M/155T/190R, 84M/135K, 84H/128E/155T, 55S/179V/180H, 83T/84M/128E/190R, 83T/84M/190H, 84M, or 54T/55S/179V/225A, wherein the amino acid positions are relative to the reference sequence corresponding to residues 12-231 of SEQ ID NO: 1032, or relative to the reference sequence corresponding to SEQ ID NO: 1032.

[0345] In some embodiments, the amino acid sequence of the engineered adenylate kinase comprises at least a substitution or substitution set K54T/A80D/I225A, Q55S/A80D/E180H, K54T/Q55S/A80D/R208E/I225L, R84M/K128E/F155T/L190R/S212N, K62S/F155T/L190H, K83T/R84M/F155T/L190H, K62S/K128E/V135K/L190H, I225A, R84M/F155T/L190R, K128E/L190R, L190R/S212N, K83T/R84M/F155T, K54T/R208E/I225A, R84M/F155T/L190H, R84H/S212N, R84M/A123S/F155T/S212N, K62S/K128E/L190R, Q55S/A80D/R208E/I225A, F155T/L190R, K83T/R84M/L190R/S212N, K83T/K128E/F155T/L190H/S212N, Q55S/E180H/I225A, R84M/L190R/S212N, K54T/A80D/E180H/R208E/I225A, A80D/R208E, V135K/F155T/L190R, S212N, A80D/E180H/R208E, K128E/V135K/L190R/S212N, K128E/F155T/S212N, A80D/R208E/I225L, K83T/S212N, K62S/R84M/F155T/L190R, K54T/E179V/I225A, R84H, K83T/R84M/L190R, K128E/S212N, K54T/Q55S/A80D/R208E, L190H/S212N, Q55S, K62S/K128E, K54T/A80D/R208E/I225A, K62S/K83T/R84M/L190R, E179A/I225A, L190R, A80D/V169D/R208E, K62S/K128E/S212N, A80D, K62S, K54T/Q55S/A80D/I225L, K54T/A80D/E180H/R208E, K83T/R84M/K128E/L190H/S212N, K62S/K83T/L190R, E179V/I225A, K62S/L190R, A80D/E179V, A80D/E180H, K54T/A80D, K62S/K83T/R84H/K128E/L190H/S212N, K83T/R84M/V135K/S212N, K54T/A80D/E179A/R208E, K62S/R84H/K128E, G11D/K62S/R84M/K128E/L190H/S212N, A80D/E179V/R208E, A80D/I225A, K62S/R84M/K128E/L190H/S212N, K62S/R84H/S212N, A80D/E179V/E180H/R208E/I225L, K62S/V135K, Q55S/R208E, K62S/R84H, K128E/V135K/L190H, Q55S/R208E/I225A, L190H, R84H/K128E/L190H, K62S/R84H/K128E/L190R, K62S/V135K/S212N, K54T/E179V/E180H/I225A, K128E/L190H, K62S/R84M/V135K/S212N, V135K, K54T/Q55S/I225L, Q55S/A80D/E179V/E180H, K62S/R84M/S212N, R84M/V135K/L190R, R84M/K128E, K54T, R84M/K128E/V135K, K54T/E179A/R208E/I225A, Q55S/E179V/I225L, K128E, K62S/K83T/R84M/F155T/L190R, R84M/V135K, R84H/K128E/F155T, Q55S/E179V/E180H, K83T/R84M/K128E/L190R, K83T/R84M/L190H, R84M, or K54T/Q55S/E179V/J225A, wherein the amino acid positions are relative to the reference sequence corresponding to residues 12-231 of SEQ ID NO: 1032, or relative to the reference sequence corresponding to SEQ ID NO: 1032.

[0346] In some embodiments, the engineered adenylate kinase comprises an amino acid sequence having at least 70%, 75%, 80%, 81%, 82%, 83%, 84%, 85%, 86%, 87%, 88%, 89%, 90%, 91%, 92%, 93%, 94%, 95%, 96%, 97%, 98%, 99%, or more sequence identity to the reference sequence corresponding to residues 12-231 of SEQ ID NO: 1388, or to the reference sequence corresponding to SEQ ID NO: 1388, wherein the amino acid sequence comprises one or more substitutions relative to the reference sequence corresponding to residues 12-231 of SEQ ID NO: 1388, or relative to the reference sequence corresponding to SEQ ID NO: 1388.

[0347] In some embodiments, the engineered adenylate kinase comprises an amino acid sequence having at least 70%, 75%, 80%, 81%, 82%, 83%, 84%, 85%, 86%, 87%, 88%, 89%, 90%, 91%, 92%, 93%, 94%, 95%, 96%, 97%, 98%, 99%, or more sequence identity to the reference sequence corresponding to residues 12-231 of an even-numbered SEQ ID NO. of SEQ ID NOs: 1554-1786, or to the reference sequence corresponding to an even-numbered SEQ ID NO. of SEQ ID NOs: 1554-1786, wherein the amino acid sequence comprises one or more substitutions relative to the reference sequence corresponding to residues 12-231 of SEQ ID NO: 1388, or relative to the reference sequence corresponding to SEQ ID NO: 1388.

[0348] In some embodiments, the amino acid sequence of the engineered adenylate kinase comprises at least a substitution or substitution set at amino acid position(s) 143, 228, 136, 82, 156, 205, 226, 150, 219, 217, 218, 68, 142, 212, 213, 79, 230, 207, 155, 227, 129, 210, 133, 151, 43, 204, 182, 82/136/150/217, 136/150, 79/81/143/156/212/228, 82/136, 79/81/143/212, 79/133/228, 81/143/156/212, 136/219, 82/136/226, 136/150/217, 133/156, 133/143/228, 150/217, 82/136/150, 81, 81/143, 81/133/228, 143/228, 212/228, 79/81, 133/228, 133/212, 136/217, 216, 215, or 127, wherein the amino acid positions are relative to the reference sequence corresponding to residues 12-231 of SEQ ID NO: 1388, or relative to the reference sequence corresponding to SEQ ID NO: 1388.

[0349] In some embodiments, the amino acid sequence of the engineered adenylate kinase comprises at least a substitution or substitution set, or amino acid residue(s) 143S, 228G, 136A, 143T, 82Q, 143A, 156C, 205P, 82P, 226P, 228L, 143C, 150G, 150S, 219P, 150P, 217H, 226T, 143G, 218L, 68S, 142R, 212I, 212L, 228P, 213S, 226S, 156T, 79P, 230A, 218A, 143R, 228S, 68L, 207T, 228R, 155A, 136S, 150L, 150V, 227P, 129L, 230Q, 210V, 205L, 68G, 133W, 155W, 212R, 207A, 151F, 212P, 218I, 129P, 43A, 230P, 129S, 68A, 142F, 204S, 136Y, 182S, 133S, 228I, 43C, 217G, 129I, 82Q/136L/150G/217P, 136A/150S, 79P/81S/143A/156C/212I/228G, 82Q/136A, 79P/81S/143A/212I, 217P, 79P/133F/228L, 81S/143A/156T/212I, 136A/219A, 82Q/136A/226P, 136A/150S/217P, 136A/150G, 133F, 133F/156C, 133F/143A/228L, 136L, 150S/217P, 82Q/136A/150S, 81S, 81S/143T, 81S/133F/228L, 143A/228L, 212I/228G, 79P/81S, 133F/228L, 133F/212M, 136L/217H, 82P/136L, 216H, 215P, 143P, 151R, 212M, 213P, 127S, 133Q, 212W, 219G, or 219S, wherein the amino acid positions are relative to the reference sequence corresponding to residues 12-231 of SEQ ID NO: 1388, or relative to the reference sequence corresponding to SEQ ID NO: 1388.

[0350] In some embodiments, the amino acid sequence of the engineered adenylate kinase comprises at least a substitution or substitution set I143S, W228G, Q136A, I143T, V82Q, I143A, L156C, 1205P, V82P, L226P, W228L, I143C, I150G, I150S, V219P, I150P, N217H, L226T, I143G, V218L, E68S, L142R, S212I, S212L, W228P, Q213S, L226S, L156T, N79P, D230A, V218A, I143R, W228S, E68L, K207T, W228R, F155A, Q136S, I150L, I150V, G227P, V129L, D230Q, D210V, I205L, E68G, E133W, F155W, S212R, K207A, Y151F, S212P, V218I, V129P, S43A, D230P, V129S, E68A, L142F, G204S, Q136Y, V182S, E133S, W228I, S43C, N217G, V129I, V82Q/Q136L/I150G/N217P, Q136A/I150S, N79P/V81S/I143A/L156C/S212I/W228G, V82Q/Q136A, N79P/V81S/I143A/S212I, N217P, N79P/E133F/W228L, V81S/I143A/L156T/S212I, Q136A/V219A, V82Q/Q136A/L226P, Q136A/I1505/N217P, Q136A/I150G, E133F, E133F/L156C, E133F/I143A/W228L, Q136L, I150S/N217P, V82Q/Q136A/I150S, V81S, V81S/I143T, V81S/E133F/W228L, I143A/W228L, S212I/W228G, N79P/V81S, E133F/W228L, E133F/S212M, Q136L/N217H, V82P/Q136L, D216H, I215P, I143P, Y151R, S212M, Q213P, I127S, E133Q, S212W, V219G, or V219S, wherein the amino acid positions are relative to the reference sequence corresponding to residues 12-231 of SEQ ID NO: 1388, or relative to the reference sequence corresponding to SEQ ID NO: 1388.

[0351] In some embodiments, the engineered adenylate kinase comprises an amino acid sequence having at least 70%, 75%, 80%, 81%, 82%, 83%, 84%, 85%, 86%, 87%, 88%, 89%, 90%, 91%, 92%, 93%, 94%, 95%, 96%, 97%, 98%, 99%, or more sequence identity to the reference sequence corresponding to residues 12-231 of SEQ ID NO: 1708, or to the reference sequence corresponding to SEQ ID NO: 1708, wherein the amino acid sequence comprises one or more substitutions relative to the reference sequence corresponding to residues 12-231 of SEQ ID NO: 1708, or relative to the reference sequence corresponding to SEQ ID NO: 1708.

[0352] In some embodiments, the engineered adenylate kinase comprises an amino acid sequence having at least 70%, 75%, 80%, 81%, 82%, 83%, 84%, 85%, 86%, 87%, 88%, 89%, 90%, 91%, 92%, 93%, 94%, 95%, 96%, 97%, 98%, 99%, or more sequence identity to the reference sequence corresponding to residues 12-231 of an even-numbered SEQ ID NO. of SEQ ID NOs: 1788-1968, or to the reference sequence corresponding to an even-numbered SEQ ID NO. of SEQ ID NOs: 1788-1968, wherein the amino acid sequence comprises one or more substitutions relative to the reference sequence corresponding to residues 12-231 of SEQ ID NO: 1708, or relative to the reference sequence corresponding to SEQ ID NO: 1708.

[0353] In some embodiments, the amino acid sequence of the engineered adenylate kinase comprises at least a substitution or substitution set at amino acid position(s) 127, 143/155/219/228, 219, 127/142, 142/151/207/218, 143/213, 151/218, 127/142/218, 142/151, 143/155/205/213/228, 127/142/207, 127/216/218, 142/151/207, 143/219, 127/207, 127/218, 143/219/228, 127/216, 68/127/207, 143/155/212/228, 151, 143/213/228, 143/155/205, 151/207/216, 143/228, 68/127/207/218, 143/155, 143, 205/213/219, 155/212/219/228, 205/219/228, 143/205, 142/207, 143/205/219, 143/212/213, 127/207/218, 142, 127/142/151/207/218, 143/205/219/228, 205/213/228, 68/151/207, 68/127/142/207, 68/127, 218, 127/142/196, 142/207/218, 68/142/216, 68/127/216/218, 68/127/218, 151/216/218, 143/212/228, 127/142/151, 151/207, 127/142/216, 129/207/218, 68/142/151/207, 68/142/151, 151/207/218, 228, 155/213, 127/142/151/218, 127/151, 155/228, 68/142/207, 80/151/207, 205/228, 68/142/207/216/218, 68/218, 68/207, 216/218, 68/142, 212, 205, or 142/207/216/218, wherein the amino acid positions are relative to the reference sequence corresponding to residues 12-231 of SEQ ID NO: 1708, or relative to the reference sequence corresponding to SEQ ID NO: 1708.

[0354] In some embodiments, the amino acid sequence of the engineered adenylate kinase comprises at least a substitution or substitution set, or amino acid residue(s) 127P, 143S/155A/219P/228R, 219P, 127P/142R, 142R/151A/207A/218A, 143G/213L, 151A/218A, 127P/142R/218I, 142R/151A, 143S/155A/205L/213L/228R, 127P/142R/207A, 127P/216P/218A, 142R/151A/207A, 143S/219P, 127P/207A, 127P/218I, 143G/219P/228R, 127P/216P, 68L/127P/207L, 143G/155A/212R/228R, 151A, 143S/219P/228R, 143S/213L/228R, 143G/155A/205L, 151A/207A/216P, 143G/228R, 68L/127P/207A, 68L/127P/207A/218A, 143G/155A, 143G, 205L/213L/219P, 155A/212R/219P/228R, 143S/228R, 205L/219P/228R, 143G/205L, 142R/207A, 143G/205L/219P, 143G/212R/213L, 127P/207L/218I, 142R, 127P/216P/218I, 127P/142R/151A/207A/218I, 143S/205L/219P/228R, 205L/213L/228R, 143G/219P, 142R/207L, 68L/151A/207L, 143S/213L, 142R/151A/207L, 127P/142R/207L, 68L/127P/142R/207L, 143S/205L, 68L/127P, 218A, 127P/142R/196I, 142R/207L/218A, 1435/155A, 143S, 68L/142R/216P, 68L/127P/216P/218I, 68L/127P/218I, 151A/216P/218I, 143S/212R/228R, 127P/142R/151A, 151A/207L, 127P/142R/216P, 129I/207A/218A, 142R/207L/218I, 68L/142R/151A/207A, 151A/207A, 68L/142R/151A, 151A/207L/218I, 228R, 155A/213L, 127P/142R/151A/218I, 127P/151A, 155A/228R, 143S/155A/205L, 151A/216P/218A, 68L/142R/207L, 80V/151A/207L, 205L/228R, 68L/142R/207A/216P/218I, 68L/218I, 68L/207A, 216P/218I, 68L/142R, 212R, 68L/207L, 205L, or 142R/207A/216P/218I, wherein the amino acid positions are relative to the reference sequence corresponding to residues 12-231 of SEQ ID NO: 1708, or relative to the reference sequence corresponding to SEQ ID NO: 1708.

[0355] In some embodiments, the amino acid sequence of the engineered adenylate kinase comprises at least a substitution or substitution set I127P, I143S/F155A/V219P/W228R, V219P, I127P/L142R, L142R/Y151A/K207A/V218A, I143G/Q213L, Y151A/V218A, I127P/L142R/V218I, L142R/Y151A, I143S/F155A/I205L/Q213L/W228R, I127P/L142R/K207A, I127P/D216P/V218A, L142R/Y151A/K207A, I143S/V219P, I127P/K207A, I127P/V218I, I143G/V219P/W228R, I127P/D216P, E68L/I127P/K207L, I143G/F155A/S212R/W228R, Y151A, I143S/V219P/W228R, I143S/Q213L/W228R, I143G/F155A/I205L, Y151A/K207A/D216P, I143G/W228R, E68L/I127P/K207A, E68L/I127P/K207A/V218A, I143G/F155A, I143G, I205L/Q213L/V219P, F155A/S212R/V219P/W228R, I143S/W228R, I205L/V219P/W228R, I143G/I205L, L142R/K207A, I143G/I205L/V219P, I143G/S212R/Q213L, I127P/K207L/V218I, L142R, I127P/D216P/V218I, I127P/L142R/Y151A/K207A/V218I, I143S/I205L/V219P/W228R, I205L/Q213L/W228R, I143G/V219P, L142R/K207L, E68L/Y151A/K207L, I143S/Q213L, L142R/Y151A/K207L, I127P/L142R/K207L, E68L/I127P/L142R/K207L, I143S/I205L, E68L/I127P, V218A, I127P/L142R/V196I, L142R/K207L/V218A, I143S/F155A, I143S, E68L/L142R/D216P, E68L/I127P/D216P/V218I, E68L/I127P/V218I, Y151A/D216P/V218I, I143S/S212R/W228R, I127P/L142R/Y151A, Y151A/K207L, I127P/L142R/D216P, V129I/K207A/V218A, L142R/K207L/V218I, E68L/L142R/Y151A/K207A, Y151A/K207A, E68L/L142R/Y151A, Y151A/K207L/V218I, W228R, F155A/Q213L, I127P/L142R/Y151A/V218I, I127P/Y151A, F155A/W228R, I143S/F155A/I205L, Y151A/D216P/V218A, E68L/L142R/K207L, A80V/Y151A/K207L, I205L/W228R, E68L/L142R/K207A/D216P/V218I, E68L/V218I, E68L/K207A, D216P/V218I, E68L/L142R, S212R, E68L/K207L, I205L, or L142R/K207A/D216P/V218I, wherein the amino acid positions are relative to the reference sequence corresponding to residues 12-231 of SEQ ID NO: 1708, or relative to the reference sequence corresponding to SEQ ID NO: 1708.

[0356] In some embodiments, the engineered adenylate kinase comprises an amino acid sequence having at least 70%, 75%, 80%, 81%, 82%, 83%, 84%, 85%, 86%, 87%, 88%, 89%, 90%, 91%, 92%, 93%, 94%, 95%, 96%, 97%, 98%, 99%, or more sequence identity to the reference sequence corresponding to residues 12-231 of SEQ ID NO: 1952, or to the reference sequence corresponding to SEQ ID NO: 1952, wherein the amino acid sequence comprises one or more substitutions relative to the reference sequence corresponding to residues 12-231 of SEQ ID NO: 1952, or relative to the reference sequence corresponding to SEQ ID NO: 1952.

[0357] In some embodiments, the engineered adenylate kinase comprises an amino acid sequence having at least 70%, 75%, 80%, 81%, 82%, 83%, 84%, 85%, 86%, 87%, 88%, 89%, 90%, 91%, 92%, 93%, 94%, 95%, 96%, 97%, 98%, 99%, or more sequence identity to the reference sequence corresponding to residues 12-231 of an even-numbered SEQ ID NO. of SEQ ID NOs: 1970-2032, or to the reference sequence corresponding to an even-numbered SEQ ID NO. of SEQ ID NOs: 1970-2032, wherein the amino acid sequence comprises one or more substitutions relative to the reference sequence corresponding to residues 12-231 of SEQ ID NO: 1952, or relative to the reference sequence corresponding to SEQ ID NO: 1952.

[0358] In some embodiments, the amino acid sequence of the engineered adenylate kinase comprises at least a substitution or substitution set at amino acid position(s) 18/118, 87/119/192, 119/173/192, 118, 87/119, 18/118/170, 18, 119, 192, 87, 89, 59, 170, 64, 112, 93, 184, 146, 51, 125, 192, 191, 117, 172, or 163, wherein the amino acid positions are relative to the reference sequence corresponding to residues 12-231 of SEQ ID NO: 1952, or relative to the reference sequence corresponding to SEQ ID NO: 1952.

[0359] In some embodiments, the amino acid sequence of the engineered adenylate kinase comprises at least a substitution or substitution set, or amino acid residue(s) 18L/118G, 87M/119K/192A, 119K/173R/192A, 118G, 87M/119K, 18L/118G/1705, 18L, 119K, 192A, 87E, 87M, 89Q, 192I, 59L, 170S, 64R, 112N, 93E, 184S, 146N, 112K, 51T, 125I, 93S, 192W, 112A, 191D, 51M, 117L, 93Y, 172T, or 163Q, wherein the amino acid positions are relative to the reference sequence corresponding to residues 12-231 of SEQ ID NO: 1952, or relative to the reference sequence corresponding to SEQ ID NO: 1952.

[0360] In some embodiments, the amino acid sequence of the engineered adenylate kinase comprises at least a substitution or substitution set F18L/N118G, S87M/R119K/K192A, R119K/Q173R/K192A, N118G, S87M/R119K, F18L/N118G/G170S, F18L, RI 19K, K192A, S87E, S87M, K89Q, K192I, V59L, G170S, K64R, S112N, K93E, H184S, K146N, S112K, I51T, V125I, K93S, K192W, S112A, E191D, I51M, Q117L, K93Y, V172T, or L163Q, wherein the amino acid positions are relative to the reference sequence corresponding to residues 12-231 of SEQ ID NO: 1952, or relative to the reference sequence corresponding to SEQ ID NO: 1952.

[0361] In some embodiments, the engineered adenylate kinase comprises an amino acid sequence having at least 70%, 75%, 80%, 81%, 82%, 83%, 84%, 85%, 86%, 87%, 88%, 89%, 90%, 91%, 92%, 93%, 94%, 95%, 96%, 97%, 98%, 99%, or more sequence identity to the reference sequence corresponding to residues 12-231 of SEQ ID NO: 1980, or to the reference sequence corresponding to SEQ ID NO: 1980, wherein the amino acid sequence comprises one or more substitutions relative to the reference sequence corresponding to residues 12-231 of SEQ ID NO: 1980, or relative to the reference sequence corresponding to SEQ ID NO: 1980.

[0362] In some embodiments, the engineered adenylate kinase comprises an amino acid sequence having at least 70%, 75%, 80%, 81%, 82%, 83%, 84%, 85%, 86%, 87%, 88%, 89%, 90%, 91%, 92%, 93%, 94%, 95%, 96%, 97%, 98%, 99%, or more sequence identity to the reference sequence corresponding to residues 12-231 of an even-numbered SEQ ID NO. of SEQ ID NOs: 2034-2134, or to the reference sequence corresponding to an even-numbered SEQ ID NO. of SEQ ID NOs: 2034-2134, wherein the amino acid sequence comprises one or more substitutions relative to the reference sequence corresponding to residues 12-231 of SEQ ID NO: 1980, or relative to the reference sequence corresponding to SEQ ID NO: 1980.

[0363] In some embodiments, the amino acid sequence of the engineered adenylate kinase comprises at least a substitution or substitution set at amino acid position(s) 87/119/192, 87/192, 87/119, 119/192, 192, 119, 146/192, 87, 59/87, 59/87/112/146, 146, 87/112/119, 74, 75, 66, 181, 81, 73, 77, 188, 216, 82, 136, 214, 21, 217, 154, 133, 71, 212, or 228, wherein the amino acid positions are relative to the reference sequence corresponding to residues 12-231 of SEQ ID NO: 1980, or relative to the reference sequence corresponding to SEQ ID NO: 1980.

[0364] In some embodiments, the amino acid sequence of the engineered adenylate kinase comprises at least a substitution or substitution set, or amino acid residue(s) 87E/119K/192A, 87E/192A, 87E/119K, 119K/192A, 87M/119K, 192A, 119K, 146N/192A, 87E, 87M/192A, 87M, 59L/87E, 59L/87E/112A/146N, 146N, 87E/112A/119K, 74G, 75L, 66A, 181V, 66W, 66G, 66Q, 81F, 66H, 73R, 66N, 77S, 77A, 66D, 66V, 188L, 77Q, 73I, 216E, 82L, 136L, 214L, 188G, 214T, 21S, 66T, 217E, 154R, 216T, 133V, 71T, 214R, 136I, 212H, 214P, or 228Q, wherein the amino acid positions are relative to the reference sequence corresponding to residues 12-231 of SEQ ID NO: 1980, or relative to the reference sequence corresponding to SEQ ID NO: 1980.

[0365] In some embodiments, the amino acid sequence of the engineered adenylate kinase comprises at least a substitution or substitution set S87E/R119K/K192A, S87E/K192A, S87E/R119K, R119K/K192A, S87M/R119K, K192A, RI 19K, K146N/K192A, S87E, S87M/K192A, S87M, V59L/S87E, V59L/S87E/S112A/K146N, K146N, S87E/S112A/R119K, P74G, D75L, I66A, T181V, I66W, I66G, I66Q, V81F, I66H, V73R, I66N, L77S, L77A, I66D, I66V, V188L, L77Q, V73I, P216E, V82L, A136L, G214L, V188G, G214T, P21S, I66T, P217E, I154R, P216T, E133V, E71T, G214R, A136I, S212H, G214P, or W228Q, wherein the amino acid positions are relative to the reference sequence corresponding to residues 12-231 of SEQ ID NO: 1980, or relative to the reference sequence corresponding to SEQ ID NO: 1980.

[0366] In some embodiments, the engineered adenylate kinase comprises an amino acid sequence having at least 70%, 75%, 80%, 81%, 82%, 83%, 84%, 85%, 86%, 87%, 88%, 89%, 90%, 91%, 92%, 93%, 94%, 95%, 96%, 97%, 98%, 99%, or more sequence identity to the reference sequence corresponding to residues 12-231 of SEQ ID NO: 2072, or to the reference sequence corresponding to SEQ ID NO: 2072, wherein the amino acid sequence comprises one or more substitutions relative to the reference sequence corresponding to residues 12-231 of SEQ ID NO: 2072, or relative to the reference sequence corresponding to SEQ ID NO: 2072.

[0367] In some embodiments, the engineered adenylate kinase comprises an amino acid sequence having at least 70%, 75%, 80%, 81%, 82%, 83%, 84%, 85%, 86%, 87%, 88%, 89%, 90%, 91%, 92%, 93%, 94%, 95%, 96%, 97%, 98%, 99%, or more sequence identity to the reference sequence corresponding to residues 12-231 of an even-numbered SEQ ID NO. of SEQ ID NOs: 2136-2264, or to the reference sequence corresponding to an even-numbered SEQ ID NO. of SEQ ID NOs: 2136-2264, wherein the amino acid sequence comprises one or more substitutions relative to the reference sequence corresponding to residues 12-231 of SEQ ID NO: 2072, or relative to the reference sequence corresponding to SEQ ID NO: 2072.

[0368] In some embodiments, the amino acid sequence of the engineered adenylate kinase comprises at least a substitution or substitution set at amino acid position(s) 87, 194, 197, 93, 202, 38, 91, 183, 39, 146, 203, 37, 92, 36, 89, 131, 132, 90, 148, 35/197, 231, or 56, wherein the amino acid positions are relative to the reference sequence corresponding to residues 12-231 of SEQ ID NO: 2072, or relative to the reference sequence corresponding to SEQ ID NO: 2072.

[0369] In some embodiments, the amino acid sequence of the engineered adenylate kinase comprises at least a substitution or substitution set, or amino acid residue(s) 87R, 87K, 87L, 194R, 197L, 87Y, 93G, 202E, 38C, 91V, 194L, 183L, 93T, 39T, 91L, 146H, 203E, 203L, 146N, 37G, 194Y, 37R, 92L, 36R, 36S, 89T, 131A, 132T, 90F, 197Q, 90V, 148S, 91S, 35E/197V, 132V, 197A, 197V, 93P, 92S, 36M, 39A, 194V, 87V, 132G, 38F, 90T, 231R, 148F, 91G, 91A, 36I, 87E, 37L, 231T, 231A, 89P, 202S, 36E, 231Q, 87A, 146V, 146R, 56T, 93A, or 203R, wherein the amino acid positions are relative to the reference sequence corresponding to residues 12-231 of SEQ ID NO: 2072, or relative to the reference sequence corresponding to SEQ ID NO: 2072.

[0370] In some embodiments, the amino acid sequence of the engineered adenylate kinase comprises at least a substitution or substitution set S87R, S87K, S87L, Q194R, I197L, S87Y, K93G, K202E, G38C, C91V, Q194L, R183L, K93T, I39T, C91L, K146H, K203E, K203L, K146N, T37G, Q194Y, T37R, E92L, K36R, K36S, K89T, E131A, D132T, D90F, I197Q, D90V, G148S, C91S, A35E/I197V, D132V, I197A, I197V, K93P, E92S, K36M, I39A, Q194V, S87V, D132G, G38F, D90T, K231R, G148F, C91G, C91A, K36I, S87E, T37L, K231T, K231A, K89P, K202S, K36E, K231Q, S87A, K146V, K146R, N56T, K93A, or K203R, wherein the amino acid positions are relative to the reference sequence corresponding to residues 12-231 of SEQ ID NO: 2072, or relative to the reference sequence corresponding to SEQ ID NO: 2072.

[0371] In some embodiments, the engineered adenylate kinase comprises an amino acid sequence having at least 70%, 75%, 80%, 81%, 82%, 83%, 84%, 85%, 86%, 87%, 88%, 89%, 90%, 91%, 92%, 93%, 94%, 95%, 96%, 97%, 98%, 99%, or more sequence identity to the reference sequence corresponding to residues 12-231 of SEQ ID NO: 2138, or to the reference sequence corresponding to SEQ ID NO: 2138, wherein the amino acid sequence comprises one or more substitutions relative to the reference sequence corresponding to residues 12-231 of SEQ ID NO: 2138, or relative to the reference sequence corresponding to SEQ ID NO: 2138.

[0372] In some embodiments, the engineered adenylate kinase comprises an amino acid sequence having at least 70%, 75%, 80%, 81%, 82%, 83%, 84%, 85%, 86%, 87%, 88%, 89%, 90%, 91%, 92%, 93%, 94%, 95%, 96%, 97%, 98%, 99%, or more sequence identity to the reference sequence corresponding to residues 12-231 of an even-numbered SEQ ID NO. of SEQ ID NOs: 2266-2366, or to the reference sequence corresponding to an even-numbered SEQ ID NO. of SEQ ID NOs: 2266-2366, wherein the amino acid sequence comprises one or more substitutions relative to the reference sequence corresponding to residues 12-231 of SEQ ID NO: 2138, or relative to the reference sequence corresponding to SEQ ID NO: 2138.

[0373] In some embodiments, the amino acid sequence of the engineered adenylate kinase comprises at least a substitution or substitution set at amino acid position(s) 161, 162, 153, 216, 212, 156, 214, 229, 77/143/214/216, 143/156/216, 77/143, 77/143/216, 77/214/216, 77/216, 143/156, 156/216, 143, 77, 77/214, 77/143/161/162/212/214, 77/162/214/216, 77/143/156/214/216, 77/143/156/162/212/216, 77/143/156/161/214/216, 77/156/162/216, 156/161/214/216, 77/143/162/214/216, 143/216, 214/216, 143/156/214/216, 143/214/216, 77/143/212/216, 143/156/161/162/216, 156/162/214, 77/143/156/161/162, 143/161/214/216, 77/161/216, or 143/212/214/216, wherein the amino acid positions are relative to the reference sequence corresponding to residues 12-231 of SEQ ID NO: 2138, or relative to the reference sequence corresponding to SEQ ID NO: 2138.

[0374] In some embodiments, the amino acid sequence of the engineered adenylate kinase comprises at least a substitution or substitution set, or amino acid residue(s) 161G, 162G, 153C, 216L, 212Q, 216H, 156V, 161L, 214W, 229C, 216M, 216V, 214A, 214M, 77I/143V/214E/216R, 143V/156V/216R, 77I/143V, 77I/143V/216R, 77I/214E/216R, 77I/216L, 143V/156V, 156V/216R, 143V, 77I/214E/216L, 77I, 77I/214E, 77I/143V/161L/162G/212Q/214E, 77I/162G/214E/216L, 77I/143V/156V/214E/216L, 77I/143V/156V/162G/212Q/216R, 77I/143V/156V/161L/214E/216R, 77I/216R, 77I/156V/162G/216R, 156V/161L/214E/216L, 77I/143V/162G/214W/216L, 143V/216L, 214E/216L, 143V/156V/214E/216R, 143V/214E/216L, 143V/214E/216R, 214E, 77I/143V/212Q/216R, 143V/156V/161L/162G/216R, 156V/162G/214E, 77I/143V/156V/161L/162G, 143V/161L/214E/216R, 77I/161L/216R, 143V/212Q/214E/216R, 77I/143V/214W/216R, 143V/216R, or 216R, wherein the amino acid positions are relative to the reference sequence corresponding to residues 12-231 of SEQ ID NO: 2138, or relative to the reference sequence corresponding to SEQ ID NO: 2138.

[0375] In some embodiments, the amino acid sequence of the engineered adenylate kinase comprises at least a substitution or substitution set D161G, E162G, M153C, P216L, S212Q, P216H, L156V, D161L, G214W, S229C, P216M, P216V, G214A, G214M, L77I/I143V/G214E/P216R, I143V/L156V/P216R, L77I/I143V, L77I/I143V/P216R, L77I/G214E/P216R, L77I/P216L, I143V/L156V, L156V/P216R, I143V, L77I/G214E/P216L, L77I, L77I/G214E, L77I/I143V/D161L/E162G/S212Q/G214E, L77I/E162G/G214E/P216L, L77I/I143V/L156V/G214E/P216L, L77I/I143V/L156V/E162G/S212Q/P216R, L77I/I143V/L156V/D161L/G214E/P216R, L77I/P216R, L77I/L156V/E162G/P216R, L156V/D161L/G214E/P216L, L77I/I143V/E162G/G214W/P216L, I143V/P216L, G214E/P216L, I143V/L156V/G214E/P216R, I143V/G214E/P216L, I143V/G214E/P216R, G214E, L77I/I143V/S212Q/P216R, I143V/L156V/D161L/E162G/P216R, L156V/E162G/G214E, L77I/I143V/L156V/D161L/E162G, I143V/D161L/G214E/P216R, L77I/D161L/P216R, I143V/S212Q/G214E/P216R, L77I/I143V/G214W/P216R, I143V/P216R, or P216R, wherein the amino acid positions are relative to the reference sequence corresponding to residues 12-231 of SEQ ID NO: 2138, or relative to the reference sequence corresponding to SEQ ID NO: 2138.

[0376] In some embodiments, the engineered adenylate kinase comprises an amino acid sequence having at least 70%, 75%, 80%, 81%, 82%, 83%, 84%, 85%, 86%, 87%, 88%, 89%, 90%, 91%, 92%, 93%, 94%, 95%, 96%, 97%, 98%, 99%, or more sequence identity to the reference sequence corresponding to residues 12-231 of SEQ ID NO: 2294, or to the reference sequence corresponding to SEQ ID NO: 2294, wherein the amino acid sequence comprises one or more substitutions relative to the reference sequence corresponding to residues 12-231 of SEQ ID NO: 2294, or relative to the reference sequence corresponding to SEQ ID NO: 2294.

[0377] In some embodiments, the engineered adenylate kinase comprises an amino acid sequence having at least 70%, 75%, 80%, 81%, 82%, 83%, 84%, 85%, 86%, 87%, 88%, 89%, 90%, 91%, 92%, 93%, 94%, 95%, 96%, 97%, 98%, 99%, or more sequence identity to the reference sequence corresponding to residues 12-231 of an even-numbered SEQ ID NO. of SEQ ID NOs: 2368-2594, or to the reference sequence corresponding to an even-numbered SEQ ID NO. of SEQ ID NOs: 2368-2594, wherein the amino acid sequence comprises one or more substitutions relative to the reference sequence corresponding to residues 12-231 of SEQ ID NO: 2294, or relative to the reference sequence corresponding to SEQ ID NO: 2294.

[0378] In some embodiments, the amino acid sequence of the engineered adenylate kinase comprises at least a substitution at amino acid position 80, 105, 228, 50, 175, 170, 82, 173, 65, 53, 184, 122, 195, 68, 89, 34, 118, 119, 87, 179, 117, 113, 54, 190, 216, 88, 36, 166, 38, 169, 66, 142, 136, 131, 187, 40, 74, 127, 55, 148, 215, 64, 155, 116, 90, 132, 60, 94, 112, 120, 37, 108, 35, 51, 61, 212, 172, 59, or 56, or combinations thereof, wherein the amino acid positions are relative to the reference sequence corresponding to residues 12-231 of SEQ ID NO: 2294, or relative to the reference sequence corresponding to SEQ ID NO: 2294.

[0379] In some embodiments, the amino acid sequence of the engineered adenylate kinase comprises at least a substitution, or amino acid residue 80P, 105K, 228S, 50Q, 175F, 170R, 82L, 173S, 65T, 53M, 184V, 122S, 195M, 228L, 68S, 89A, 34E, 118S, 53S, 119F, 87A, 179C, 117S, 113E, 50C, 80G, 122H, 89V, 80R, 54I, 190Q, 216M, 88R, 80D, 36Q, 105S, 195G, 68V, 105L, 175D, 184T, 166L, 89H, 38R, 54G, 38F, 89I, 169I, 66C, 142W, 117L, 136Y, 131V, 187Y, 40L, 173T, 74C, 228V, 127L, 80L, 55G, 184M, 136V, 228T, 148R, 88T, 228Q, 66S, 215V, 195R, 190G, 64R, 184R, 122A, 505, 142M, 155W, 80S, 216G, 116A, 90C, 132K, 105G, 60W, 94Y, 112T, 87S, 187G, 120T, 87I, 68R, 37Y, 173R, 105M, 108V, 35L, 68I, 166F, 35F, 120S, 184S, 169A, 51L, 61V, 116F, 65D, 54H, 212C, 172S, 55L, 59L, 60C, 228F, or 56Q, or combinations thereof, wherein the amino acid positions are relative to the reference sequence corresponding to residues 12-231 of SEQ ID NO: 2294, or relative to the reference sequence corresponding to SEQ ID NO: 2294.

[0380] In some embodiments, the amino acid sequence of the engineered adenylate kinase comprises at least a substitution A80P, R105K, W228S, D50Q, L175F, S170R, V82L, Q173S, E65T, A53M, H184V, T122S, P195M, W228L, L68S, K89A, S34E, G118S, A53S, R119F, K87A, E179C, Q117S, F113E, D50C, A80G, T122H, K89V, A80R, K54I, R190Q, R216M, E88R, A80D, K36Q, R105S, P195G, L68V, R105L, L175D, H184T, D166L, K89H, G38R, K54G, G38F, K89I, V169I, W66C, R142W, Q117L, A136Y, E131V, K187Y, P40L, Q173T, P74C, W228V, I127L, A80L, Q55G, H184M, A136V, W228T, G148R, E88T, W228Q, W66S, I215V, P195R, R190G, K64R, H184R, T122A, D50S, R142M, F155W, A80S, R216G, S116A, D90C, D132K, R105G, A60W, G94Y, S112T, K87S, K187G, Q120T, K87I, L68R, T37Y, Q173R, R105M, E108V, A35L, L68I, D166F, A35F, Q120S, H184S, V169A, I51L, S61V, S116F, E65D, K54H, S212C, V172S, Q55L, V59L, A60C, W228F, or N56Q, or combinations thereof, wherein the amino acid positions are relative to the reference sequence corresponding to residues 12-231 of SEQ ID NO: 2294, or relative to the reference sequence corresponding to SEQ ID NO: 2294.

[0381] In some embodiments, the engineered adenylate kinase comprises an amino acid sequence having at least 70%, 75%, 80%, 81%, 82%, 83%, 84%, 85%, 86%, 87%, 88%, 89%, 90%, 91%, 92%, 93%, 94%, 95%, 96%, 97%, 98%, 99%, or more sequence identity to the reference sequence corresponding to residues 12-231 of SEQ ID NO: 2368, or to the reference sequence corresponding to SEQ ID NO: 2368, wherein the amino acid sequence comprises one or more substitutions relative to the reference sequence corresponding to residues 12-231 of SEQ ID NO: 2368, or relative to the reference sequence corresponding to SEQ ID NO: 2368.

[0382] In some embodiments, the engineered adenylate kinase comprises an amino acid sequence having at least 70%, 75%, 80%, 81%, 82%, 83%, 84%, 85%, 86%, 87%, 88%, 89%, 90%, 91%, 92%, 93%, 94%, 95%, 96%, 97%, 98%, 99%, or more sequence identity to the reference sequence corresponding to residues 12-231 of an even-numbered SEQ ID NO. of SEQ ID NOs: 2596-2652 or 2676-2714, or to the reference sequence corresponding to an even-numbered SEQ ID NO. of SEQ ID NOs: 2596-2652 or 2676-2714, wherein the amino acid sequence comprises one or more substitutions relative to the reference sequence corresponding to residues 12-231 of SEQ ID NO: 2368, or relative to the reference sequence corresponding to SEQ ID NO: 2368.

[0383] In some embodiments, the amino acid sequence of the engineered adenylate kinase comprises at least a substitution or substitution set at amino acid position(s) 20, 21, 22, 43, 44, 46, 48, 138, 181, 182, 136/228, 82/142/173/184/216, 184/216, 50/184/216, 127/173/184, 105/136/170/175/228, 105/175, 50/184, 105/170/175/228, 50/127/173/184, 50/142/184/216, 50/82/127/216, 50, 50/82/173/216, 50/127/142/184/216, 50/82/127, 105/136, 105/228, 105/136/175/228, 173/216, 50/173, 228, 127/173, 105/136/170/195, 50/82/216, 175/228, or 50/82/127/142/184/216, wherein the amino acid positions are relative to the reference sequence corresponding to residues 12-231 of SEQ ID NO: 2368, or relative to the reference sequence corresponding to SEQ ID NO: 2368.

[0384] In some embodiments, the amino acid sequence of the engineered adenylate kinase comprises at least a substitution or substitution set, or amino acid residue(s) 20A, 21L, 21N, 21V, 22A, 43A, 43G, 43H, 44S, 46E, 46F, 46L, 46M, 46Y, 48F, 138M, 138V, 181C, 181V, 182A, 136Y/228V, 82L/142M/173T/184T/216M, 184T/216M, 50Q/184M/216M, 127L/173R/184M, 105K/136V/170R/175F/228T, 105K/175F, 127L/173T/184M, 50Q/184T, 105K/170R/175F/228V, 50Q/127L/173R/184M, 50Q/142M/184M/216M, 50Q/82L/127L/216M, 50Q, 50Q/82L/173T/216M, 50Q/127L/142W/184M/216M, 50Q/82L/127L, 136V/228V, 105K/136V, 105K/228V, 105K/136V/175F/228V, 173T/216M, 50Q/173T, 228V, 127L/173R, 105K/136V/170R/195G, 50Q/82L/216M, 175F/228V, or 50Q/82L/127L/142M/184M/216M, wherein the amino acid positions are relative to the reference sequence corresponding to residues 12-231 of SEQ ID NO: 2368, or relative to the reference sequence corresponding to SEQ ID NO: 2368.

[0385] In some embodiments, the amino acid sequence of the engineered adenylate kinase comprises at least a substitution or substitution set G20A, P21L, P21N, P21V, P22A, S43A, S43G, S43H, T44S, D46E, D46F, D46L, D46M, D46Y, L48F, L138M, L138V, T181C, T181V, V182A A136Y/W228V, V82L/R142M/Q173T/H184T/R216M, H184T/R216M, D50Q/H184M/R216M, I127L/Q173R/H184M, R105K/A136V/S170R/L175F/W228T, R105K/L175F, I127L/Q173T/H184M, D50Q/H184T, R105K/S170R/L175F/W228V, D50Q/I127L/Q173R/H184M, D50Q/R142M/H184M/R216M, D50Q/V82L/I127L/R216M, D50Q, D50Q/V82L/Q173T/R216M, D50Q/I127L/R142W/H184M/R216M, D50Q/V82L/I127L, A136V/W228V, R105K/A136V, R105K/W228V, R105K/A136V/L175F/W228V, Q173T/R216M, D50Q/Q173T, W228V, I127L/Q173R, R105K/A136V/S170R/P195G, D50Q/V82L/R216M, L175F/W228V, or D50Q/V82L/I127L/R142M/H184M/R216M, wherein the amino acid positions are relative to the reference sequence corresponding to residues 12-231 of SEQ ID NO: 2368, or relative to the reference sequence corresponding to SEQ ID NO: 2368.

[0386] In some embodiments, the engineered adenylate kinase comprises an amino acid sequence having at least 70%, 75%, 80%, 81%, 82%, 83%, 84%, 85%, 86%, 87%, 88%, 89%, 90%, 91%, 92%, 93%, 94%, 95%, 96%, 97%, 98%, 99%, or more sequence identity to the reference sequence corresponding to residues 12-231 of SEQ ID NO: 2602, or to the reference sequence corresponding to SEQ ID NO: 2602, wherein the amino acid sequence comprises one or more substitutions relative to the reference sequence corresponding to residues 12-231 of SEQ ID NO: 2602, or relative to the reference sequence corresponding to SEQ ID NO: 2602.

[0387] In some embodiments, the engineered adenylate kinase comprises an amino acid sequence having at least 70%, 75%, 80%, 81%, 82%, 83%, 84%, 85%, 86%, 87%, 88%, 89%, 90%, 91%, 92%, 93%, 94%, 95%, 96%, 97%, 98%, 99%, or more sequence identity to the reference sequence corresponding to residues 12-231 of an even-numbered SEQ ID NO. of SEQ ID NOs: 2716-2988, or to the reference sequence corresponding to an even-numbered SEQ ID NO. of SEQ ID NOs: 2716-2988, wherein the amino acid sequence comprises one or more substitutions relative to the reference sequence corresponding to residues 12-231 of SEQ ID NO: 2602, or relative to the reference sequence corresponding to SEQ ID NO: 2602.

[0388] In some embodiments, the amino acid sequence of the engineered adenylate kinase comprises at least a substitution or substitution set at amino acid position(s) 18, 18/56, 20, 21, 26, 27, 29, 30, 32, 42, 43, 50, 66, 67, 69, 70, 80, 98, 99, 102, 135, 137, 139, 141, 142, 143, 148, 149, 152, 153, 156, 173, 184, or 216, wherein the amino acid positions are relative to the reference sequence corresponding to residues 12-231 of SEQ ID NO: 2602, or relative to the reference sequence corresponding to SEQ ID NO: 2602.

[0389] In some embodiments, the amino acid sequence of the engineered adenylate kinase comprises at least a substitution or substitution set, or amino acid residue(s) 18C/56T, 18E, 20P, 20R, 20T, 20V, 21L, 21R, 21T, 26L, 27C, 29R, 30L, 30S, 30Y, 32L, 42T, 43N, 50R, 66P, 67R, 69F, 70R, 80G, 80S, 98A, 98G, 98Q, 99A, 99C, 102A, 102C, 102N, 135I, 137L, 139H, 141G, 141V, 142L, 143T, 148P, 148S, 149L, 152F, 153V, 156A, 173F, 184N, 216D, 216E, 216G, 216L, 216N, 216P, or 216W, wherein the amino acid positions are relative to the reference sequence corresponding to residues 12-231 of SEQ ID NO: 2602, or relative to the reference sequence corresponding to SEQ ID NO: 2602.

[0390] In some embodiments, the amino acid sequence of the engineered adenylate kinase comprises at least a substitution or substitution set L18C/N56T, L18E, G20P, G20R, G20T, G20V, P21L, P21R, P21T, K26L, G27C, Q29R, G30L, G30S, G30Y, I32L, I42T, S43N, Q50R, W66P, M67R, K69F, G70R, P80G, P80S, D98A, D98G, D98Q, G99A, G99C, R102A, R102C, R102N, V135I, R137L, L139H, R141G, R141V, R142L, V143T, G148P, G148S, R149L, N152F, M153V, L156A, Q173F, M184N, M216D, M216E, M216G, M216L, M216N, M216P, or M216W, wherein the amino acid positions are relative to the reference sequence corresponding to residues 12-231 of SEQ ID NO: 2602, or relative to the reference sequence corresponding to SEQ ID NO: 2602.

[0391] In some embodiments, the amino acid sequence of the engineered adenylate kinase comprises at least a substitution or substitution set at amino acid position(s) 65, 65/104, 65/104/105/116/127, 65/104/105/127/136, 65/104/136, 65/104/136/170, 65/105/116/136/170, 65/105/127/136, 65/105/127/136/175, 65/105/127/170, 65/105/127/175, 65/105/136, 65/105/136/170, 65/105/170, 65/116, 65/127/136, 65/127/136/170, 65/127/170, 94/173, 94/187, 104/105, 104/105/127, 104/105/127/136/175/195, 104/105/136/170, 104/127, 104/127/136/170, 104/127/136/175, 105, 105/116/127/136/170/175, 105/127/136, 105/127/136/195, 105/136, 105/136/195, 116/127/136/175, 127/195, 132, 136, or 170, wherein the amino acid positions are relative to the reference sequence corresponding to residues 12-231 of SEQ ID NO: 2602, or relative to the reference sequence corresponding to SEQ ID NO: 2602.

[0392] In some embodiments, the amino acid sequence of the engineered adenylate kinase comprises at least a substitution or substitution set 65T, 65T/104A, 65T/104A/105K/116A/127L, 65T/104A/105K/127L/136V, 65T/104A/136V, 65T/104A/136V/170R, 65T/105K/116A/136V/170R, 65T/105K/127L/136V, 65T/105K/127L/136V/175F, 65T/105K/127L/170R, 65T/105K/127L/175F, 65T/105K/136V, 65T/105K/136V/170R, 65T/105K/170R, 65T/116A, 65T/127L/136V/170R, 65T/127L/136Y, 65T/127L/170R, 94Y/173R, 94Y/187G, 104A/105K, 104A/105K/127L, 104A/105K/127L/136V/175F/195G, 104A/105K/136V/170R, 104A/127L, 104A/127L/136V/170R, 104A/127L/136V/175F, 105K, 105K/116A/127L/136Y/170R/175F, 105K/127L/136V, 105K/127L/136V/195G, 105K/136V, 105K/136V/195G, 116A/127L/136Y/175F, 127L/195G, 132K, 136V, and 170R, wherein the amino acid positions are relative to the reference sequence corresponding to residues 12-231 of SEQ ID NO: 2602, or relative to the reference sequence corresponding to SEQ ID NO: 2602.

[0393] In some embodiments, the amino acid sequence of the engineered adenylate kinase comprises at least a substitution or substitution set E65T, E65T/V104A, E65T/V104A/R105K/S116A/I127L, E65T/V104A/R105K/I127L/A136V, E65T/V104A/A136V, E65T/V104A/A136V/S170R, E65T/R105K/S116A/A136V/S170R, E65T/R105K/I127L/A136V, E65T/R105K/I127L/A136V/L175F, E65T/R105K/I127L/S170R, E65T/R105K/I127L/L175F, E65T/R105K/A136V, E65T/R105K/A136V/S170R, E65T/R105K/S170R, E65T/S116A, E65T/I127L/A136V/S170R, E65T/I127L/A136Y, E65T/I127L/S170R, G94Y/Q173R, G94Y/K187G, V104A/R105K, V104A/R105K/I127L, V104A/R105K/I127L/A136V/L175F/P195G, V104A/R105K/A136V/S170R, V104A/I127L, V104A/I127L/A136V/S170R, V104A/I127L/A136V/L175F, R105K, R105K/S116A/I127L/A136Y/S170R/L175F, R105K/I127L/A136V, R105K/I127L/A136V/P195G, R105K/A136V, R105K/A136V/P195G, S116A/I127L/A136Y/L175F, I127L/P195G, D132K, A136V, or S170R, wherein the amino acid positions are relative to the reference sequence corresponding to residues 12-231 of SEQ ID NO: 2602, or relative to the reference sequence corresponding to SEQ ID NO: 2602.

[0394] In some embodiments, the amino acid sequence of the engineered adenylate kinase comprises at least a substitution at amino acid position 36, 37, 40, 50, 59, 89, 117, 120, 128, 168, or 203, or combinations thereof, wherein the amino acid positions are relative to the reference sequence corresponding to residues 12-231 of SEQ ID NO: 2602, or relative to the reference sequence corresponding to SEQ ID NO: 2602.

[0395] In some embodiments, the amino acid sequence of the engineered adenylate kinase comprises at least a substitution, or amino acid residue 36V, 37I, 37L, 40S, 50A, 59T, 59Y, 89P, 117L, 120L, 1281, 168L, or 203L, or combinations thereof, wherein the amino acid positions are relative to the reference sequence corresponding to residues 12-231 of SEQ ID NO: 2602, or relative to the reference sequence corresponding to SEQ ID NO: 2602.

[0396] In some embodiments, the amino acid sequence of the engineered adenylate kinase comprises at least a substitution K36V, T37I, T37L, P40S, Q50A, V59T, V59Y, K89P, Q117L, Q120L, E1281, G168L, or K203L, or combinations thereof, wherein the amino acid positions are relative to the reference sequence corresponding to residues 12-231 of SEQ ID NO: 2602, or relative to the reference sequence corresponding to SEQ ID NO: 2602.

[0397] In some embodiments, the amino acid sequence of the engineered adenylate kinase comprises at least a substitution at amino acid position 32, 36, 37, 50, 58, 61, 89, 90, 94, 97, 104, 110, 111, 118, 119, 128, 131, 132, 166, 169, 170, 172, 192, 195, or 200, or combinations thereof, wherein the amino acid positions are relative to the reference sequence corresponding to residues 12-231 of SEQ ID NO: 2602, or relative to the reference sequence corresponding to SEQ ID NO: 2602.

[0398] In some embodiments, the amino acid sequence of the engineered adenylate kinase comprises at least a substitution, or amino acid residue 32F, 36S, 37F, 50N, 50V, 58Y, 61E, 61N, 89L, 90S, 94M, 94V, 97I, 104R, 110F, 111P, 111R, 118L, 119P, 128C, 128R, 131G, 132L, 166L, 166S, 169Y, 170G, 172A, 192H, 195I, or 200A, or combinations thereof, wherein the amino acid positions are relative to the reference sequence corresponding to residues 12-231 of SEQ ID NO: 2602, or relative to the reference sequence corresponding to SEQ ID NO: 2602.

[0399] In some embodiments, the amino acid sequence of the engineered adenylate kinase comprises at least a substitution I32F, K36S, T37F, Q50N, Q50V, E58Y, S61E, S61N, K89L, D90S, G94M, G94V, L97I, V104R, L110F, D111P, D111R, G118L, R119P, E128C, E128R, E131G, D132L, D166L, D166S, V169Y, S170G, V172A, K192H, P195I, or Y200A, or combinations thereof, wherein the amino acid positions are relative to the reference sequence corresponding to residues 12-231 of SEQ ID NO: 2602, or relative to the reference sequence corresponding to SEQ ID NO: 2602.

[0400] In some embodiments, the engineered adenylate kinase comprises an amino acid sequence having at least 70%, 75%, 80%, 81%, 82%, 83%, 84%, 85%, 86%, 87%, 88%, 89%, 90%, 91%, 92%, 93%, 94%, 95%, 96%, 97%, 98%, 99%, or more sequence identity to the reference sequence corresponding to residues 12-231 of SEQ ID NO: 2832, or to the reference sequence corresponding to SEQ ID NO: 2832, wherein the amino acid sequence comprises one or more substitutions relative to the reference sequence corresponding to residues 12-231 of SEQ ID NO: 2832, or relative to the reference sequence corresponding to SEQ ID NO: 2832.

[0401] In some embodiments, the engineered adenylate kinase comprises an amino acid sequence having at least 70%, 75%, 80%, 81%, 82%, 83%, 84%, 85%, 86%, 87%, 88%, 89%, 90%, 91%, 92%, 93%, 94%, 95%, 96%, 97%, 98%, 99%, or more sequence identity to the reference sequence corresponding to residues 12-231 of an even-numbered SEQ ID NO. of SEQ ID NOs: 2990-3032, or to the reference sequence corresponding to an even-numbered SEQ ID NO. of SEQ ID NOs: 2990-3032, wherein the amino acid sequence comprises one or more substitutions relative to the reference sequence corresponding to residues 12-231 of SEQ ID NO: 2832, or relative to the reference sequence corresponding to SEQ ID NO: 2832.

[0402] In some embodiments, the amino acid sequence of the engineered adenylate kinase comprises at least a substitution or substitution set at amino acid position(s) 36, 36/50, 36/50/89/93/110, 36/50/89/93/139, 36/50/89/139/170, 36/50/89/172, 36/89, 36/170, 50, 50/89/93, 50/89/93/139, 50/93, 50/170, 89/170/172, 90/104, 90/151/157, 104/151/154, 104/151/154/157, 104/154/157/216, 151/157, 151/216, or 216, wherein the amino acid positions are relative to the reference sequence corresponding to residues 12-231 of SEQ ID NO: 2832, or relative to the reference sequence corresponding to SEQ ID NO: 2832.

[0403] In some embodiments, the amino acid sequence of the engineered adenylate kinase comprises at least a substitution or substitution set 36S, 36S/50N, 36S/50N/89L/93V/110F, 36S/50N/89L/93V/139R, 36S/50N/89L/139R/170G, 36S/50N/89L/172A, 36S/89L, 36S/170G, 50N, 50N/89L/93V, 50N/89L/93V/139R, 50N/93V, 50N/170G, 89L/170G/172A, 90S/104R, 90S/151F/157V, 104R/151F/154Q, 104R/151F/154Q/157V, 104R/154Q/157V/216E, 151F/157V, 151F/216E, or 216D, wherein the amino acid positions are relative to the reference sequence corresponding to residues 12-231 of SEQ ID NO: 2832, or relative to the reference sequence corresponding to SEQ ID NO: 2832.

[0404] In some embodiments, the amino acid sequence of the engineered adenylate kinase comprises at least a substitution or substitution set K36S, K36S/Q50N, K36S/Q50N/K89L/K93V/L1101F, K36S/Q50N/K89L/K93V/L139R, K36S/Q50N/K89L/L139R/S170G, K36S/Q50N/K89L/V172A, K36S/K89L, K36S/S170G, Q50N, Q50N/K89L/K93V, Q50N/K89L/K93V/L139R, Q50N/K93V, Q50N/S170G, K89L/S170G/V172A, D90S/A104R, D90S/Y151F/P157V, A104R/Y151F/I154Q, A104R/Y151F/I154Q/P157V, A104R/I154Q/P157V/M216E, Y151F/P157V, Y151F/M216E, or M216D, wherein the amino acid positions are relative to the reference sequence corresponding to residues 12-231 of SEQ ID NO: 2832, or relative to the reference sequence corresponding to SEQ ID NO: 2832.

[0405] In some embodiments, the engineered adenylate kinase comprises an amino acid sequence having at least 70%, 75%, 80%, 81%, 82%, 83%, 84%, 85%, 86%, 87%, 88%, 89%, 90%, 91%, 92%, 93%, 94%, 95%, 96%, 97%, 98%, 99%, or more sequence identity to the reference sequence corresponding to residues 12-231 of SEQ ID NO: 2994, or to the reference sequence corresponding to SEQ ID NO: 2994, wherein the amino acid sequence comprises one or more substitutions relative to the reference sequence corresponding to residues 12-231 of SEQ ID NO: 2994, or relative to the reference sequence corresponding to SEQ ID NO: 2994.

[0406] In some embodiments, the engineered adenylate kinase comprises an amino acid sequence having at least 70%, 75%, 80%, 81%, 82%, 83%, 84%, 85%, 86%, 87%, 88%, 89%, 90%, 91%, 92%, 93%, 94%, 95%, 96%, 97%, 98%, 99%, or more sequence identity to the reference sequence corresponding to residues 12-231 of an even-numbered SEQ ID NO. of SEQ ID NOs: 3034-3150, or to the reference sequence corresponding to an even-numbered SEQ ID NO. of SEQ ID NOs: 3034-3150, wherein the amino acid sequence comprises one or more substitutions relative to the reference sequence corresponding to residues 12-231 of SEQ ID NO: 2994, or relative to the reference sequence corresponding to SEQ ID NO: 2994.

[0407] In some embodiments, the amino acid sequence of the engineered adenylate kinase comprises at least a substitution at amino acid position 50, 58, 59, 68, 74, 76, 79, 80, 83, 90, 112, 113, 119, 157, 170, 172, 182, 184, 217, 224, 226, 228, 229, 230, or 231, or combinations thereof, wherein the amino acid positions are relative to the reference sequence corresponding to residues 12-231 of SEQ ID NO: 2994, or relative to the reference sequence corresponding to SEQ ID NO: 2994.

[0408] In some embodiments, the amino acid sequence of the engineered adenylate kinase comprises at least a substitution, or amino acid residue 50L, 58C, 59W, 68A, 68E, 68V, 74Q, 76G, 76L, 79A, 79K, 79L, 79P, 79W, 80W, 90K, 112C, 113W, 119S, 170H, 170P, 170R, 172M, 182G, 182L, 182Q, 184R, 217T, 224S, 224T, 226K, 226R, 228D, 230M, or 231R, or combinations thereof, wherein the amino acid positions are relative to the reference sequence corresponding to residues 12-231 of SEQ ID NO: 2994, or relative to the reference sequence corresponding to SEQ ID NO: 2994.

[0409] In some embodiments, the amino acid sequence of the engineered adenylate kinase comprises at least a substitution Q50L, E58C, V59W, L68A, L68E, L68V, P74Q, E76G, E76L, N79A, N79K, N79L, N79P, N79W, P80W, D90K, S112C, F113W, R119S, S170H, S170P, S170R, V172M, V182G, V182L, V182Q, M184R, P217T, G224S, G224T, L226K, L226R, W228D, D230M, or K231R, or combinations thereof, wherein the amino acid positions are relative to the reference sequence corresponding to residues 12-231 of SEQ ID NO: 2994, or relative to the reference sequence corresponding to SEQ ID NO: 2994.

[0410] In some embodiments, the amino acid sequence of the engineered adenylate kinase comprises at least a substitution or substitution set at amino acid position(s) 79/104/157/228, 79/157/228/229, 79/157/229, 79/228, 83/104, 83/104/151/168/173/190, 83/113, 83/173/190, 83/173/190/201, 83/173/201, 83/190, 83/190/201/216, 83/216, 104/157, 157/173/190/216, 157/183, 157/190, 157/190/216, 157/228, 173/216, or 201/216, wherein the amino acid positions are relative to the reference sequence corresponding to residues 12-231 of SEQ ID NO: 2994, or relative to the reference sequence corresponding to SEQ ID NO: 2994.

[0411] In some embodiments, the amino acid sequence of the engineered adenylate kinase comprises at least a substitution or substitution set, or amino acid residue(s) 79W/104R/157P/228V, 79W/157P/228V/229I, 79W/157P/229I, 79W/228V, 83L, 83L/104R, 83L/104R/151Y/168S/173T/190Q, 83L/113Y, 83L/173T/201A, 83L/173V/190Q, 83L/173V/190Q/201F, 83L/190Q, 83L/190Q/201A/216E, 83L/216E, 104R/157P, 157P, 157P/173T/190Q/216E, 157P/183L, 157P/190Q, 157P/190Q/216E, 157P/228V, 173T/216E, 201F/216E, or 229I, wherein the amino acid positions are relative to the reference sequence corresponding to residues 12-231 of SEQ ID NO: 2994, or relative to the reference sequence corresponding to SEQ ID NO: 2994.

[0412] In some embodiments, the amino acid sequence of the engineered adenylate kinase comprises at least a substitution or substitution set N79W/A104R/V157P/W228V, N79W/V157P/W228V/S229I, N79W/V157P/S229I, N79W/W228V, K83L, K83L/A104R, K83L/A104R/F151Y/G168S/Q173T/R190Q, K83L/F113Y, K83L/Q173T/S201A, K83L/Q173V/R190Q, K83L/Q173V/R190Q/S201F, K83L/R190Q, K83L/R190Q/S201A/M216E, K83L/M216E, A104R/V157P, V157P, V157P/Q173T/R190Q/M216E, V157P/R183L, V157P/R190Q, V157P/R190Q/M216E, V157P/W228V, Q173T/M216E, S201F/M216E, or S229I, wherein the amino acid positions are relative to the reference sequence corresponding to residues 12-231 of SEQ ID NO: 2994, or relative to the reference sequence corresponding to SEQ ID NO: 2994.

[0413] In some embodiments, the engineered adenylate kinase comprises an amino acid sequence having at least 70%, 75%, 80%, 81%, 82%, 83%, 84%, 85%, 86%, 87%, 88%, 89%, 90%, 91%, 92%, 93%, 94%, 95%, 96%, 97%, 98%, 99%, or more sequence identity to the reference sequence corresponding to residues 12-231 of SEQ ID NO: 3104, or to the reference sequence corresponding to SEQ ID NO: 3104, wherein the amino acid sequence comprises one or more substitutions relative to the reference sequence corresponding to residues 12-231 of SEQ ID NO: 3104, or relative to the reference sequence corresponding to SEQ ID NO: 3104.

[0414] In some embodiments, the engineered adenylate kinase comprises an amino acid sequence having at least 70%, 75%, 80%, 81%, 82%, 83%, 84%, 85%, 86%, 87%, 88%, 89%, 90%, 91%, 92%, 93%, 94%, 95%, 96%, 97%, 98%, 99%, or more sequence identity to the reference sequence corresponding to residues 12-231 of an even-numbered SEQ ID NO. of SEQ ID NOs: 3152-3192, or to the reference sequence corresponding to an even-numbered SEQ ID NO. of SEQ ID NOs: 3152-3192, wherein the amino acid sequence comprises one or more substitutions relative to the reference sequence corresponding to residues 12-231 of SEQ ID NO: 3104, or relative to the reference sequence corresponding to SEQ ID NO: 3104.

[0415] In some embodiments, the amino acid sequence of the engineered adenylate kinase comprises at least a substitution or substitution set at amino acid position(s) 104, 104/157, 104/157/228/229, 104/157/229, 104/170/190/228, 104/201/228, 157/228, 157/228/229, 170/190/228, 170/190/228/229, 190, 190/229, or 201/228, wherein the amino acid positions are relative to the reference sequence corresponding to residues 12-231 of SEQ ID NO: 3104, or relative to the reference sequence corresponding to SEQ ID NO: 3104.

[0416] In some embodiments, the amino acid sequence of the engineered adenylate kinase comprises at least a substitution or substitution set, or amino acid residue(s) 104R, 104R/157P, 104R/157P/228V/229I, 104R/157P/229I, 104R/170P/190R/228V, 104R/201S/228V, 157P/228V, 157P/228V/229I, 170P/190R/228V, 170P/190R/228V/229I, 190R, 190R/229I, or 2015/228V, wherein the amino acid positions are relative to the reference sequence corresponding to residues 12-231 of SEQ ID NO: 3104, or relative to the reference sequence corresponding to SEQ ID NO: 3104.

[0417] In some embodiments, the amino acid sequence of the engineered adenylate kinase comprises at least a substitution or substitution set A104R, A104R/V157P, A104R/V157P/W228V/S229I, A104R/V157P/S229I, A104R/S170P/Q190R/W228V, A104R/A201S/W228V, V157P/W228V, V157P/W228V/5229I, S170P/Q190R/W228V, S170P/Q190R/W228V/S229I, Q190R, Q190R/S229I, or A201S/W228V, wherein the amino acid positions are relative to the reference sequence corresponding to residues 12-231 of SEQ ID NO: 3104, or relative to the reference sequence corresponding to SEQ ID NO: 3104.

[0418] In some embodiments, the amino acid sequence of the engineered adenylate kinase comprises at least a substitution or substitution set at amino acid position(s) 104, 104/157/190/228, 104/170/190, 104/170/228, 104/190, 104/190/201, 104/190/228, 104/228/229, or 228, wherein the amino acid positions are relative to the reference sequence corresponding to residues 12-231 of SEQ ID NO: 3104, or relative to the reference sequence corresponding to SEQ ID NO: 3104.

[0419] In some embodiments, the amino acid sequence of the engineered adenylate kinase comprises at least a substitution or substitution set, or amino acid residue(s) 104R, 104R/157P/190R/228V, 104R/170P/190R, 104R/170P/228V, 104R/190R, 104R/190R/201S, 104R/190R/228V, 104R/228V/229I, or 228V, wherein the amino acid positions are relative to the reference sequence corresponding to residues 12-231 of SEQ ID NO: 3104, or relative to the reference sequence corresponding to SEQ ID NO: 3104.

[0420] In some embodiments, the amino acid sequence of the engineered adenylate kinase comprises at least a substitution or substitution set A104R, A104R/V157P/Q190R/W228V, A104R/S170P/Q190R, A104R/S170P/W228V, A104R/Q190R, A104R/Q190R/A201S, A104R/Q190R/W228V, A104R/W228V/S229I, or W228V, wherein the amino acid positions are relative to the reference sequence corresponding to residues 12-231 of SEQ ID NO: 3104, or relative to the reference sequence corresponding to SEQ ID NO: 3104.

[0421] In some embodiments, the amino acid sequence of the engineered adenylate kinase comprises at least a substitution at an amino acid position set forth in Tables 7.2, 8.2, 9.2, 10.2, 11.2, 12.1, 13.2, 14.1, 15.2, 16.2, 17.2, 18.2, 19.2, 20.2, 21.2, 23.2, 24.2, 25.2, 26.2, 27.2, 28.2, 29.2, 30.2, 31.2, 32.2, 33.2, 34.2, 35.2, 36.2, 37.2, 38.2, 40.2, 41.2, 42.2, 43.2, 44.2, 45.2, 46.2, 47.2, 48.2, and 49.2, wherein the amino acid positions are relative to the reference sequence corresponding to SEQ ID NO: 2, 4, 172, 376, 508, 524, 584, 610, 674, 816, 874, 1032, 1388, 1708, 1952, 1980, 2072, 2138, 2294, 2368, 2602, 2832, 2994, or 3104.

[0422] In some embodiments, the amino acid sequence of the engineered adenylate kinase comprises at least one substitution set forth in Tables 7.2, 8.2, 9.2, 10.2, 11.2, 12.1, 13.2, 14.1, 15.2, 16.2, 17.2, 18.2, 19.2, 20.2, 21.2, 23.2, 24.2, 25.2, 26.2, 27.2, 28.2, 29.2, 30.2, 31.2, 32.2, 33.2, 34.2, 35.2, 36.2, 37.2, 38.2, 40.2, 41.2, 42.2, 43.2, 44.2, 45.2, 46.2, 47.2, 48.2, and 49.2, wherein the amino acid positions are relative to the reference sequence corresponding to SEQ ID NO: 2, 4, 172, 376, 508, 524, 584, 610, 674, 816, 874, 1032, 1388, 1708, 1952, 1980, 2072, 2138, 2294, 2368, 2602, 2832, 2994, or 3104.

[0423] In some embodiments, the amino acid sequence of the engineered adenylate kinase comprises at least a substitution or substitution set at amino acid position(s) set forth in Tables 7.2, 8.2, 9.2, 10.2, 11.2, 12.1, 13.2, 14.1, 15.2, 16.2, 17.2, 18.2, 19.2, 20.2, 21.2, 23.2, 24.2, 25.2, 26.2, 27.2, 28.2, 29.2, 30.2, 31.2, 32.2, 33.2, 34.2, 35.2, 36.2, 37.2, 38.2, 40.2, 41.2, 42.2, 43.2, 44.2, 45.2, 46.2, 47.2, 48.2, and 49.2, wherein the amino acid positions are relative to the reference sequence corresponding to SEQ ID NO: 2, 4, 172, 376, 508, 524, 584, 610, 674, 816, 874, 1032, 1388, 1708, 1952, 1980, 2072, 2138, 2294, 2368, 2602, 2832, 2994, or 3104.

[0424] In some embodiments, the amino acid sequence of the engineered adenylate kinase comprises at least a substitution or substitution set of an engineered adenylate kinase variant set forth in Tables 7.2, 8.2, 9.2, 10.2, 11.2, 12.1, 13.2, 14.1, 15.2, 16.2, 17.2, 18.2, 19.2, 20.2, 21.2, 23.2, 24.2, 25.2, 26.2, 27.2, 28.2, 29.2, 30.2, 31.2, 32.2, 33.2, 34.2, 35.2, 36.2, 37.2, 38.2, 40.2, 41.2, 42.2, 43.2, 44.2, 45.2, 46.2, 47.2, 48.2, and 49.2, wherein the amino acid positions are relative to the reference sequence corresponding to SEQ ID NO: 2, 4, 172, 376, 508, 524, 584, 610, 674, 816, 874, 1032, 1388, 1708, 1952, 1980, 2072, 2138, 2294, 2368, 2602, 2832, 2994, or 3104.

[0425] In some embodiments, the engineered adenylate kinase comprises an amino acid sequence having at least 70%, 75%, 80%, 81%, 82%, 83%, 84%, 85%, 86%, 87%, 88%, 89%, 90%, 91%, 92%, 93%, 94%, 95%, 96%, 97%, 98%, 99% or more sequence identity to a reference amino acid sequence comprising a substitution or substitution set of an engineered adenylate kinase variant set forth in Tables 7.2, 8.2, 9.2, 10.2, 11.2, 12.1, 13.2, 14.1, 15.2, 16.2, 17.2, 18.2, 19.2, 20.2, 21.2, 23.2, 24.2, 25.2, 26.2, 27.2, 28.2, 29.2, 30.2, 31.2, 32.2, 33.2, 34.2, 35.2, 36.2, 37.2, 38.2, 40.2, 41.2, 42.2, 43.2, 44.2, 45.2, 46.2, 47.2, 48.2, and 49.2, wherein the amino acid positions are relative to the reference sequence corresponding to SEQ ID NO: 2, 4, 172, 376, 508, 524, 584, 610, 674, 816, 874, 1032, 1388, 1708, 1952, 1980, 2072, 2138, 2294, 2368, 2602, 2832, 2994, or 3104.

[0426] In some embodiments, the engineered adenylate kinase comprises an amino acid sequence comprising residues 12-231 of an even-numbered SEQ ID NO. of SEQ ID NOs: 4-1302, 1356-2652, and 2676-3192, or comprising an even-numbered SEQ ID NO. of SEQ ID NOs: 4-1302, 1356-2652, and 2676-3192. In some embodiments, the amino acid sequence of the engineered adenylate kinase optionally includes 1, 2, 3, 4, 5, 6, 7, 8, 9, or up to 10 substitutions, insertions, and/or deletions. In some embodiments, the amino acid sequence of the engineered adenylate kinase includes 1, 2, 3, 4, 5, 6, 7, 8, 9, or up to 10 substitutions. In some embodiments, the amino acid sequence of the engineered adenylate kinase optionally includes 1, 2, 3, 4, or 5 substitutions, insertions, and/or deletions. In some embodiments, the amino acid sequence of the engineered adenylate kinase optionally includes 1, 2, 3, 4, or 5 substitutions.

[0427] In some embodiments, the engineered adenylate kinase comprises an amino acid sequence comprising residues 12-231 of SEQ ID NO: 4, 172, 376, 508, 524, 584, 610, 674, 816, 874, 1032, 1388, 1708, 1952, 1980, 2072, 2138, 2294, 2368, 2602, 2832, 2994, or 3104, or comprising SEQ ID NO: 4, 172, 376, 508, 524, 584, 610, 674, 816, 874, 1032, 1388, 1708, 1952, 1980, 2072, 2138, 2294, 2368, 2602, 2832, 2994, or 3104. In some embodiments, the amino acid sequence of the engineered adenylate kinase optionally includes 1, 2, 3, 4, 5, 6, 7, 8, 9, or up to 10 substitutions, insertions, and/or deletions. In some embodiments, the amino acid sequence of the engineered adenylate kinase includes 1, 2, 3, 4, 5, 6, 7, 8, 9, or up to 10 substitutions. In some embodiments, the amino acid sequence of the engineered adenylate kinase optionally includes 1, 2, 3, 4, or 5 substitutions, insertions, and/or deletions. In some embodiments, the amino acid sequence of the engineered adenylate kinase optionally includes 1, 2, 3, 4, or 5 substitutions.

[0428] In some embodiments, the engineered adenylate kinase polypeptide has 1, 2, 3, 4, or up to 5 substitutions in the amino acid sequence. In some embodiments, the engineered adenylate kinase polypeptide has 1, 2, 3, or 4 substitutions in the amino acid sequence.

[0429] In some embodiments, the engineered adenylate kinase described herein has adenylate kinase activity and at least one improved property as compared to a reference adenylate kinase.

[0430] In some embodiments, the engineered adenylate kinase has increased activity on NMP substrate as compared to the reference adenylate kinase. In some embodiments, the NMP substrate is AMP, CMP, GMP, UMP, or TMP. In some embodiments, the engineered adenylate kinase has at least 1.1, 1.2, 1.3, 1.4, 1.5, 2, 3, 4, 5, 10, or more fold activity compared to the reference adenylate kinase.

[0431] In some embodiments, the engineered adenylate kinase is capable of converting NMP substrate to NDP product at greater than 30%, 40%, 50%, 60%, 70%, 80%, 85%, 90%, 91%, 92%, 93%, 94%, 95%, 96%, 97%, 98%, or 99%. In some embodiments, the engineered adenylate kinase is capable of converting substrate AMP, GMP, CMP, UMP, or TMP to product ADP, GDP, CDP, UDP, or TDP, respectively, at greater than 30%, 40%, 50%, 60%, 70%, 80%, 85%, 90%, 91%, 92%, 93%, 94%, 95%, 96%, 97%, 98%, or 99%.

[0432] In some embodiments, the engineered adenylate kinase has increased activity on 2′-fluoro modified nucleoside monophosphate and/or increased activity on 2′-O-methyl modified nucleoside monophosphate. In some embodiments, the engineered adenylate kinase has at least 1.1, 1.2, 1.3, 1.4, 1.5, 2, 3, 4, 5, 10, or more fold activity with 2′-fluoro modified nucleoside monophosphate and/or 2′-O-methyl modified nucleoside monophosphate as compared to the reference adenylate kinase. In some embodiments, the 2′-fluoro modified nucleoside monophosphate substrate is 2′-F-AMP, 2′-F-GMP, 2′-F-CMP, 2′-F-UMP, or 2′-F-TMP. In some embodiments, the 2′-O-methyl modified nucleoside monophosphate substrate is 2′-O-methyl-AMP, 2′-O-methyl-GMP, 2′-O-methyl-CMP, 2′-O-methyl-UMP, or 2′-O-methyl-TMP. Exemplary increases in activity with 2′-modified nucleoside monophosphate substrates are provided in the Examples.

[0433] In some embodiments, the engineered adenylate kinase is capable of converting substrate 2′-fluoro-NMP to product 2′-fluoro-NDP at greater than 30%, 40%, 50%, 60%, 70%, 80%, 85%, 90%, 91%, 92%, 93%, 94%, 95%, 96%, 97%, 98%, or 99%. In some embodiments, the engineered adenylate kinase is capable of converting substrate 2′-fluoro-AMP, 2′-fluoro-GMP, 2′-fluoro-CMP, 2′-fluoro-UMP, or 2′-fluoro-TMP to product 2′-fluoro-ADP, 2′-fluoro-GDP, 2′-fluoro-CDP, 2′-fluoro-UDP, or 2′-fluoro-TDP, respectively, at greater than 30%, 40%, 50%, 60%, 70%, 80%, 85%, 90%, 91%, 92%, 93%, 94%, 95%, 96%, 97%, 98%, or 99%.

[0434] In some embodiments, the engineered adenylate kinase is capable of converting substrate 2′-O-methyl-NMP substrate to product 2′-O-methyl-NDP at greater than 30%, 40%, 50%, 60%, 70%, 80%, 85%, 90%, 91%, 92%, 93%, 94%, 95%, 96%, 97%, 98%, or 99%. In some embodiments, the engineered adenylate kinase is capable of converting substrate 2′-O-methyl-AMP, 2′-O-methyl-GMP, 2′-O-methyl-CMP, 2′-O-methyl-UMP, or 2′-O-methyl-TMP to product 2′-O-methyl-ADP, 2′-O-methyl-GDP, 2′-O-methyl-CDP, 2′-O-methyl-UDP, or 2′-O-methyl-TDP, respectively, at greater than 30%, 40%, 50%, 60%, 70%, 80%, 85%, 90%, 91%, 92%, 93%, 94%, 95%, 96%, 97%, 98%, or 99%.

[0435] Exemplary conditions for the conversions are provided in the Examples, including for NMP substrates, 2′-fluoro NDP substrates, and 2′-O-methyl NDP substrates.

[0436] In some embodiments, the engineered adenylate kinase exhibits increased stability as compared to the reference adenylate kinase. In some embodiments, the engineered adenylate kinase exhibis increased thermostability, e.g., at 50° C. to 70° C. Exemplary stability and thermostability conditions are provided in the Examples.

[0437] In some embodiments, the engineered adenylate kinase exhibits an improved property selected from i) increased activity on unmodified nucleoside monophosphate (NMP), ii) increased stability, iii) increased thermostability, iv) increased activity on 2′-fluoro modified nucleoside monophosphate, and v) increased activity on 2′-O-methyl modified nucleoside monophosphate, or any combinations of i), ii), iii), iv), and v), as compared to a reference adenylate kinase.

[0438] In some embodiments, the reference adenylate kinase for comparison of an improved property has an amino acid sequence corresponding to residues 12-231 of SEQ ID NO: 2, 4, 172, 376, 508, 524, 584, 610, 674, 816, 874, 1032, 1388, 1708, 1952, 1980, 2072, 2138, 2294, 2368, 2602, 2832, 2994, or 3104, or an amino acid sequence corresponding to SEQ ID NO: 2, 4, 172, 376, 508, 524, 584, 610, 674, 816, 874, 1032, 1388, 1708, 1952, 1980, 2072, 2138, 2294, 2368, 2602, 2832, 2994, or 3104. In some embodiments, the reference adenylate kinase has an amino acid sequence corresponding to residues 12-231 of SEQ ID NO: 2, or an amino acid sequence corresponding to SEQ ID NO: 2.

[0439] In some embodiments, the present disclosure further provides an adenylate kinase comprising an amino acid sequence having at least 70%, 75%, 80%, 81%, 82%, 83%, 84%, 85%, 86%, 87%, 88%, 89%, 90%, 91%, 92%, 93%, 94%, 95%, 96%, 97%, 98%, 99% or more sequence identity to
[0440] (a) a sequence corresponding to residues 12 to 228 of SEQ ID NO: 1336,
   [0441] a sequence corresponding to residues 12 to 228 of SEQ ID NO: 1338,
   [0442] a sequence corresponding to residues 12 to 225 of SEQ ID NO: 1340, or
   [0443] a sequence corresponding to residues 12 to 228 of SEQ ID NO: 1342; or
[0444] (b) a sequence corresponding to SEQ ID NO: 1336;
   [0445] a sequence corresponding to SEQ ID NO: 1338;
   [0446] a sequence corresponding to SEQ ID NO: 1340; or
   [0447] a sequence corresponding to SEQ ID NO: 1342.

[0448] In some embodiments, the present disclosure provides an adenylate kinase comprising an amino acid sequence comprising:
[0449] (a) residues 12 to 228 of SEQ ID NO: 1336,
   [0450] residues 12 to 228 of SEQ ID NO: 1338,
   [0451] residues 12 to 225 of SEQ ID NO: 1340,
   [0452] residues 12 to 228 of SEQ ID NO: 1342; or
[0453] (b) SEQ ID NO: 1336;
   [0454] SEQ ID NO: 1338;
   [0455] SEQ ID NO: 1340; or
   [0456] SEQ ID NO: 1342.

[0457] In some embodiments, the engineered adenylate kinase is provided in the form of a fusion polypeptide. In some embodiments, the engineered adenylate kinase is fused to variety of polypeptide sequences, such as, by way of example and not limitation, polypeptide tags that can be used for detection and/or purification. In some embodiments, the fusion protein of the engineered adenylate kinase comprises a glycine-histidine or histidine-tag (His-tag). In some embodiments, the fusion protein of the engineered adenylate kinase comprises a polylysine, e.g., 2-12 units of lysine, such as for conjugation to a support medium. In some embodiments, the fusion protein of the engineered adenylate kinase comprises an epitope tag, such as c-myc, FLAG, V5, or hemagglutinin (HA). In some embodiments, the fusion protein of the engineered adenylate kinase comprises a GST, SUMO, Strep, MBP, or GFP tag. In some embodiments, the fusion is to the amino (N—) terminus of engineered adenylate kinase polypeptide. In some embodiments, the fusion is to the carboxy (C—) terminus of the adenylate kinase polypeptide.

[0458] In some embodiments, the present disclosure further provides functional fragments or biologically active fragments of engineered adenylate kinase polypeptides described herein. Thus, for each and every embodiment herein of an engineered adenylate kinase, a functional fragment or biologically active fragment of the engineered adenylate kinase is provided herewith. In some embodiments, a functional fragment or biologically active fragments of an engineered adenylate kinase comprises at least about 90%, 91%, 92%, 93%, 94%, 95%, 96%, 97%, 98%, or 99% of the activity of the adenylate kinase polypeptide from which it was derived (i.e., the parent adenylate kinase). In some embodiments, functional fragments or biologically active fragments comprise at least about 90%, 91%, 92%, 93%, 94%, 95%, 96%, 97%, 98%, or 99% of the parent sequence of the adenylate kinase. In some embodiments the functional fragment will be truncated by less than 5, less than 10, less than 15, less than 10, less than 25, less than 30, less than 35, less than 40, less than 45, and less than 50 amino acids.

[0459] In some embodiments, a functional fragment of an engineered adenylate kinase herein comprises at least 70%, 75%, 80%, 81%, 82%, 83%, 84%, 85%, 90%, 91%, 92%, 93%, 94%, 95%, 96%, 97%, 98%, or 99% of the parent sequence of the engineered adenylate kinase. In some embodiments, the functional fragment will be truncated by less than 5, less than 10, less than 15, less than 10, less than 25, less than 30, less than 35, less than 40, less than 45, less than 50, less than 55, less than 60, less than 65, or less than 70 amino acids.

[0460] In some embodiments, the functional fragments or biologically active fragments of the engineered adenylate kinase polypeptide described herein include at least a mutation or mutation set in the amino acid sequence of an engineered adenylate kinase described herein. Accordingly, in some embodiments, the functional fragments or biologically active fragments of the engineered adenylate kinase displays the enhanced or improved property associated with the mutation or mutation set in the parent adenylate kinase.

[0461] In some embodiments, the engineered adenylate kinase is purified, as described herein. In some embodiments, the purified preparation has the engineered adenylate kinase at least 60%, 70%, 80%, 85%, 90%, or 95% greater of the protein content of the preparation.

[0462] In some embodiments, an engineered adenylate kinase described herein is provided immobilized on a substrate or support medium, such as a solid substrate, a porous substrate, a membrane, or particles. The polypeptide can be entrapped in matrixes or membranes. In some embodiments, matrices include polymeric materials such as calcium-alginate, agar, k-carrageenin, polyacrylamide, and collagen. In some embodiments, the solid matrices, includes, among others, activated carbon, porous ceramic, and diatomaceous earth. In some embodiments, the matrix is a particle, a membrane, or a fiber. Types of membranes include, among others, nylon, cellulose, polysulfone, or polyacrylate.

[0463] In some embodiments, the engineered adenylate kinase is immobilized on the surface of a support material. In some embodiments, the polypeptide is adsorbed on the support material. In some embodiments, the polypeptide is immobilized on the support material by covalent attachment. Support materials include, among others, inorganic materials, such as alumina, silica, porous glass, ceramics, diatomaceous earth, clay, and bentonite, or organic materials, such as cellulose (CMC, DEAE-cellulose), starch, activated carbon, polyacrylamide, polystyrene, polymethacrylate, polyacrylate, and ion-exchange resins, such as Amberlite, Sephadex, and Dowex. Various functional groups known in the art may be used to conjugate the engineered adenylate kinase to the substrate or support medium, e.g., epoxide, imide, etc.

### Polynucleotides Encoding Engineered Polypeptides, Expression Vectors and Host Cells

[0464] In another aspect, the present disclosure provides recombinant polynucleotides encoding the engineered adenylate kinases described herein. In some embodiments, the recombinant polynucleotides are operably linked to one or more heterologous regulatory sequences that control gene expression to create a recombinant polynucleotide construct capable of expressing the engineered adenylate kinase. In some embodiments, an expression construct containing at least one heterologous polynucleotide encoding the engineered adenylate kinase polypeptide(s) is introduced into appropriate host cells to express the corresponding adenylate kinase polypeptide(s).

[0465] As will be apparent to the skilled artisan, availability of a protein sequence and the knowledge of the codons corresponding to the various amino acids provide a description of all the polynucleotides capable of encoding the subject polypeptides. The degeneracy of the genetic code, where the same amino acids are encoded by alternative or synonymous codons, allows an extremely large number of nucleic acids to be made, all of which encode an engineered adenylate kinase of the present disclosure. Thus, the present disclosure provides methods and compositions for the production of each and every possible variation of polynucleotides that could be made that encode the engineered adenylate kinase polypeptides described herein by selecting combinations based on the possible codon choices, and all such polynucleotide variants are to be considered specifically disclosed for any polypeptide described herein, including the amino acid sequences presented in the Examples (e.g., Tables 7.2, 8.2, 9.2, 10.2, 11.2, 12.1, 13.2, 14.1, 15.2, 16.2, 17.2, 18.2, 19.2, 20.2, 21.2, 23.2, 24.2, 25.2, 26.2, 27.2, 28.2, 29.2, 30.2, 31.2, 32.2, 33.2, 34.2, 35.2, 36.2, 37.2, 38.2, 40.2, 41.2, 42.2, 43.2, 44.2, 45.2, 46.2, 47.2, 48.2, and 49.2) and in the Sequence Listing.

[0466] In some embodiments, the codons are preferably optimized for utilization by the chosen host cell for protein production. In some embodiments, preferred codons in bacteria are used for expression in bacteria. In some embodiments, preferred codons in fungal cells are used for expression in fungal cells. In some embodiments, preferred codons in insect cells are used for expression in insect cells. In some embodiments, preferred codons in mammalian cells are used for expression in mammalian cells. In some embodiments, codon optimized polynucleotides encoding an engineered adenylate kinase polypeptide described herein contain preferred codons at about 40%, 50%, 60%, 70%, 80%, 90%, or greater than 90% of the codon positions in the full-length coding region.

[0467] Accordingly, in some embodiments, a recombinant polynucleotide of the present disclosure comprises a polynucleotide sequence encoding an engineered adenylate kinase polypeptide described herein. In some embodiments, the polynucleotide sequence of the recombinant polynucleotide has preferred codons for expression (e.g., codon optimized). In some embodiments, the polynucleotide sequence of the recombinant polynucleotide is codon optimized for expression in eukaryotic or prokaryotic cells, as further discussed herein.

[0468] In some embodiments, the recombinant polynucleotide comprises a polynucleotide sequence encoding an engineered adenylate kinase comprising an amino acid sequence having at least 70%, 75%, 80%, 81%, 82%, 83%, 84%, 85%, 86%, 87%, 88%, 89%, 90%, 91%, 92%, 93%, 94%, 95%, 96%, 97%, 98%, 99%, or more sequence identity to a reference sequence corresponding to amino acid residues 12-231 of an even-numbered SEQ ID NO. of SEQ ID NOs: 2-1302, 1356-2652, and 2676-3192, or to a reference sequence corresponding to an even-numbered SEQ ID NO. of SEQ ID NOs: 2-1302, 1356-2652, and 2676-3192, wherein the amino acid sequence comprises one or more substitutions relative to a reference sequence corresponding to amino acid residues 12-231 of SEQ ID NO: 2, 4, 172, 376, 508, 524, 584, 610, 674, 816, 874, 1032, 1388, 1708, 1952, 1980, 2072, 2138, 2294, 2368, 2602, 2832, 2994, or 3104, or relative to a reference sequence corresponding to SEQ ID NO: 2, 4, 172, 376, 508, 524, 584, 610, 674, 816, 874, 1032, 1388, 1708, 1952, 1980, 2072, 2138, 2294, 2368, 2602, 2832, 2994, or 3104.

[0469] In some embodiments, the recombinant polynucleotide comprises a polynucleotide sequence encoding an engineered adenylate kinase comprising an amino acid sequence having at least 70%, 75%, 80%, 81%, 82%, 83%, 84%, 85%, 86%, 87%, 88%, 89%, 90%, 91%, 92%, 93%, 94%, 95%, 96%, 97%, 98%, 99%, or more sequence identity to a reference sequence corresponding to amino acid residues 12-231 of SEQ ID NO: 2, 4, 172, 376, 508, 524, 584, 610, 674, 816, 874, 1032, 1388, 1708, 1952, 1980, 2072, 2138, 2294, 2368, 2602, 2832, 2994, or 3104, or to a reference sequence corresponding to SEQ ID NO: 2, 4, 172, 376, 508, 524, 584, 610, 674, 816, 874, 1032, 1388, 1708, 1952, 1980, 2072, 2138, 2294, 2368, 2602, 2832, 2994, or 3104, wherein the amino acid sequence comprises one or more substitutions relative to the reference sequence corresponding to amino acid residues 12-231 of SEQ ID NO: 2, 4, 172, 376, 508, 524, 584, 610, 674, 816, 874, 1032, 1388, 1708, 1952, 1980, 2072, 2138, 2294, 2368, 2602, 2832, 2994, or 3104, or relative to the reference sequence corresponding to SEQ ID NO: 2, 4, 172, 376, 508, 524, 584, 610, 674, 816, 874, 1032, 1388, 1708, 1952, 1980, 2072, 2138, 2294, 2368, 2602, 2832, 2994, or 3104.

[0470] In some embodiments, the recombinant polynucleotide comprises a polynucleotide sequence encoding an engineered adenylate kinase comprising an amino acid sequence having at least 70%, 75%, 80%, 81%, 82%, 83%, 84%, 85%, 86%, 87%, 88%, 89%, 90%, 91%, 92%, 93%, 94%, 95%, 96%, 97%, 98%, 99%, or more sequence identity to the reference sequence corresponding to amino acid residues 12-231 of SEQ ID NO: 2, or to the reference sequence corresponding to SEQ ID NO: 2, wherein the amino acid sequence comprises one or more substitutions relative to the reference sequence corresponding to amino acid residues 12-231 of SEQ ID NO: 2, or relative to the reference sequence corresponding to SEQ ID NO: 2.

[0471] In some embodiments, the recombinant polynucleotide comprises a polynucleotide sequence encoding an engineered adenylate kinase comprising an amino acid sequence having at least 70%, 75%, 80%, 81%, 82%, 83%, 84%, 85%, 86%, 87%, 88%, 89%, 90%, 91%, 92%, 93%, 94%, 95%, 96%, 97%, 98%, 99%, or more sequence identity to the reference sequence corresponding to amino acid residues 12-231 of SEQ ID NO: 4, 172, 376, 508, 524, 584, 610, 674, 816, 874, 1032, 1388, 1708, 1952, 1980, 2072, 2138, 2294, 2368, 2602, 2832, 2994, or 3104, or to the reference sequence corresponding to SEQ ID NO: 4, 172, 376, 508, 524, 584, 610, 674, 816, 874, 1032, 1388, 1708, 1952, 1980, 2072, 2138, 2294, 2368, 2602, 2832, 2994, or 3104, wherein the amino acid sequence comprises one or more substitutions relative to the reference sequence corresponding to amino acid residues 12-231 of SEQ ID NO: 2, or relative to the reference sequence corresponding to SEQ ID NO: 2.

[0472] In some embodiments, the recombinant polynucleotide comprises a polynucleotide sequence encoding an engineered adenylate kinase comprising an amino acid sequence having at least 70%, 75%, 80%, 81%, 82%, 83%, 84%, 85%, 86%, 87%, 88%, 89%, 90%, 91%, 92%, 93%, 94%, 95%, 96%, 97%, 98%, 99%, or more sequence identity to a reference sequence corresponding to amino acid residues 12-231 of an even-numbered SEQ ID NO. of SEQ ID NOs: 4-1302, 1356-2652, and 2676-3192, or to a reference sequence corresponding to an even-numbered SEQ ID NO. of SEQ ID NOs: 4-1302, 1356-2652, and 2676-3192, wherein the amino acid sequence comprises one or more substitutions relative to the reference sequence corresponding to amino acid residues 12-231 of SEQ ID NO: 2, or relative to the reference sequence corresponding to SEQ ID NO: 2.

[0473] In some embodiments, the recombinant polynucleotide comprises a polynucleotide sequence encoding a engineered adenylate kinase comprising an amino acid sequence comprising at least a substitution at amino acid position 11, 13, 14, 15, 16, 18, 20, 21, 22, 26, 27, 29, 30, 31, 32, 34, 35, 36, 37, 38, 39, 40, 42, 43, 44, 46, 48, 50, 51, 52, 53, 54, 55, 56, 57, 58, 59, 60, 61, 62, 63, 64, 65, 66, 67, 68, 69, 70, 71, 73, 74, 75, 76, 77, 78, 79, 80, 81, 82, 83, 84, 87, 88, 89, 90, 91, 92, 93, 94, 97, 98, 99, 100, 101, 102, 104, 105, 108, 109, 110, 111, 112, 113, 115, 116, 117, 118, 119, 120, 122, 123, 124, 125, 126, 127, 128, 129, 131, 132, 133, 134, 135, 136, 137, 138, 139, 140, 141, 142, 143, 146, 148, 149, 150, 151, 152, 153, 154, 155, 156, 157, 161, 162, 163, 166, 168, 169, 170, 172, 173, 175, 178, 179, 180, 181, 182, 183, 184, 186, 187, 188, 190, 191, 192, 194, 195, 196, 197, 198, 199, 200, 201, 202, 203, 204, 205, 206, 207, 208, 210, 211, 212, 213, 214, 215, 216, 217, 218, 219, 220, 221, 222, 223, 224, 225, 226, 227, 228, 229, 230, or 231, or combinations thereof, wherein the amino acid positions are relative to the reference sequence corresponding to amino acid residues 12-231 of SEQ ID NO: 2, or relative to the reference sequence corresponding to SEQ ID NO: 2.

[0474] In some embodiments, the recombinant polynucleotide comprises a polynucleotide sequence encoding an engineered adenylate kinase comprising an amino acid sequence comprising at least a substitution at amino acid position 13, 18, 29, 30, 31, 32, 34, 35, 48, 50, 53, 55, 59, 60, 61, 62, 66, 68, 77, 78, 80, 83, 87, 100, 104, 105, 109, 118, 119, 127, 128, 133, 136, 139, 142, 143, 150, 151, 155, 157, 168, 170, 175, 184, 186, 190, 201, 207, 212, 213, 214, 216, 217, 218, 224, or 226, or combinations thereof, wherein the amino acid positions are relative to the reference sequence corresponding to amino acid residues 12-231 of SEQ ID NO: 2, or relative to the reference sequence corresponding to SEQ ID NO: 2.

[0475] In some embodiments, the recombinant polynucleotide comprises a polynucleotide sequence encoding an engineered adenylate kinase comprising an amino acid sequence comprising at least a substitution or substitution set at amino acid position(s) 29/30/128/142/186/212/213, 18/142/212/213, 29/30/128/142/186, 40/135/214, 18/29/30/127/150, 82, 69, 118, 29/30, 206, 32, 16, 104, 111/135/136/214, 29/128/175, 178, 18/128/142, 32/108/111/156/191, 18/29/128/129/142/186, 32/133, 18/29/30/212/213/222, 29/65/127, 32/40/43/52/155/156/217, 18/29/128/129, 80, 32/43/138/152/191/214/215, 183, 18/175/186/212/213, 129, 18/29/30/65/129/142/150/186, 127/142/212/213, 30/65/142/222, 40/43/215, 136, 29/150/211/212/213/221, 43/111/136/219, 226, 88, 140/215/216, 32/133/134, or 18/29/128/186, wherein the amino acid positions are relative to the reference sequence corresponding to amino acid residues 12-231 of SEQ ID NO: 2, or relative to the reference sequence corresponding to SEQ ID NO: 2.

[0476] In some embodiments, the recombinant polynucleotide comprises a polynucleotide sequence encoding an engineered adenylate kinase comprising an amino acid sequence comprising at least a substitution at an amino acid position set forth in Tables 7.2, 8.2, 9.2, 10.2, 11.2, 12.1, 13.2, 14.1, 15.2, 16.2, 17.2, 18.2, 19.2, 20.2, 21.2, 23.2, 24.2, 25.2, 26.2, 27.2, 28.2, 29.2, 30.2, 31.2, 32.2, 33.2, 34.2, 35.2, 36.2, 37.2, 38.2, 40.2, 41.2, 42.2, 43.2, 44.2, 45.2, 46.2, 47.2, 48.2, and 49.2, wherein the amino acid positions are relative to the reference sequence corresponding to amino acid residues 12-231 of SEQ ID NO: 2, or relative to the reference sequence corresponding to SEQ ID NO: 2.

[0477] In some embodiments, the recombinant polynucleotide comprises a polynucleotide sequence encoding an engineered adenylate kinase comprising an amino acid sequence comprising at least one substitution set forth in Tables 7.2, 8.2, 9.2, 10.2, 11.2, 12.1, 13.2, 14.1, 15.2, 16.2, 17.2, 18.2, 19.2, 20.2, 21.2, 23.2, 24.2, 25.2, 26.2, 27.2, 28.2, 29.2, 30.2, 31.2, 32.2, 33.2, 34.2, 35.2, 36.2, 37.2, 38.2, 40.2, 41.2, 42.2, 43.2, 44.2, 45.2, 46.2, 47.2, 48.2, and 49.2, wherein the amino acid positions are relative to the reference sequence corresponding to amino acid residues 12-231 of SEQ ID NO: 2, or relative to the reference sequence corresponding to SEQ ID NO: 2.

[0478] In some embodiments, the recombinant polynucleotide comprises a polynucleotide sequence encoding an engineered adenylate kinase comprising an amino acid sequence comprising at least a substitution or substitution set at amino acid position(s) set forth in Tables 7.2, 8.2, 9.2, 10.2, 11.2, 12.1, 13.2, 14.1, 15.2, 16.2, 17.2, 18.2, 19.2, 20.2, 21.2, 23.2, 24.2, 25.2, 26.2, 27.2, 28.2, 29.2, 30.2, 31.2, 32.2, 33.2, 34.2, 35.2, 36.2, 37.2, 38.2, 40.2, 41.2, 42.2, 43.2, 44.2, 45.2, 46.2, 47.2, 48.2, and 49.2, wherein the amino acid positions are relative to the reference sequence corresponding to amino acid residues 12-231 of SEQ ID NO: 2, or relative to the reference sequence corresponding to SEQ ID NO: 2.

[0479] In some embodiments, the recombinant polynucleotide comprises a polynucleotide sequence encoding an engineered adenylate kinase comprising an amino acid sequence comprising at least a substitution or substitution set of an engineered adenylate kinase variant set forth in Tables 7.2, 8.2, 9.2, 10.2, 11.2, 12.1, 13.2, 14.1, 15.2, 16.2, 17.2, 18.2, 19.2, 20.2, 21.2, 23.2, 24.2, 25.2, 26.2, 27.2, 28.2, 29.2, 30.2, 31.2, 32.2, 33.2, 34.2, 35.2, 36.2, 37.2, 38.2, 40.2, 41.2, 42.2, 43.2, 44.2, 45.2, 46.2, 47.2, 48.2, and 49.2, wherein the amino acid positions are relative to the reference sequence corresponding to amino acid residues 12-231 of SEQ ID NO: 2, or relative to the reference sequence corresponding to SEQ ID NO: 2.

[0480] In some embodiments, the recombinant polynucleotide comprises a polynucleotide sequence encoding an engineered adenylate kinase comprising an amino acid sequence having at least 70%, 75%, 80%, 81%, 82%, 83%, 84%, 85%, 86%, 87%, 88%, 89%, 90%, 91%, 92%, 93%, 94%, 95%, 96%, 97%, 98%, 99% or more sequence identity to a reference amino acid sequence comprising a substitution or substitution set of an engineered adenylate kinase variant set forth in Tables 7.2, 8.2, 9.2, 10.2, 11.2, 12.1, 13.2, 14.1, 15.2, 16.2, 17.2, 18.2, 19.2, 20.2, 21.2, 23.2, 24.2, 25.2, 26.2, 27.2, 28.2, 29.2, 30.2, 31.2, 32.2, 33.2, 34.2, 35.2, 36.2, 37.2, 38.2, 40.2, 41.2, 42.2, 43.2, 44.2, 45.2, 46.2, 47.2, 48.2, and 49.2, wherein the amino acid positions are relative to the reference sequence corresponding to amino acid residues 12-231 of SEQ ID NO: 2, or relative to the reference sequence corresponding to SEQ ID NO: 2.

[0481] In some embodiments, the recombinant polynucleotide comprises a polynucleotide sequence encoding an engineered adenylate kinase comprising an amino acid sequence having at least 70%, 75%, 80%, 81%, 82%, 83%, 84%, 85%, 86%, 87%, 88%, 89%, 90%, 91%, 92%, 93%, 94%, 95%, 96%, 97%, 98%, 99%, or more sequence identity to the reference sequence corresponding to residues 12-231 of SEQ ID NO: 4, 172, 376, 508, 524, 584, 610, 674, 816, 874, 1032, 1388, 1708, 1952, 1980, 2072, 2138, 2294, 2368, 2602, 2832, 2994, or 3104, or to the reference sequence corresponding to SEQ ID NO: 4, 172, 376, 508, 524, 584, 610, 674, 816, 874, 1032, 1388, 1708, 1952, 1980, 2072, 2138, 2294, 2368, 2602, 2832, 2994, or 3104.

[0482] In some embodiments, the recombinant polynucleotide comprises a polynucleotide sequence encoding an engineered adenylate kinase comprising an amino acid sequence having at least 70%, 75%, 80%, 81%, 82%, 83%, 84%, 85%, 86%, 87%, 88%, 89%, 90%, 91%, 92%, 93%, 94%, 95%, 96%, 97%, 98%, 99%, or more sequence identity to a reference sequence corresponding to residues 12-231 of an even-numbered SEQ ID NO. of SEQ ID NOs: 4-1302, 1356-2652, and 2676-3192, or to a reference sequence corresponding to an even-numbered SEQ ID NO. of SEQ ID NOs: 4-1302, 1356-2652, and 2676-3192.

[0483] In some embodiments, the recombinant polynucleotide comprises a polynucleotide sequence encoding an engineered adenylate kinase comprising an amino acid sequence having at least 70%, 75%, 80%, 81%, 82%, 83%, 84%, 85%, 86%, 87%, 88%, 89%, 90%, 91%, 92%, 93%, 94%, 95%, 96%, 97%, 98%, 99%, or more sequence identity to the reference sequence corresponding to residues 12-231 of SEQ ID NO: 4, 172, 376, 508, 524, 584, 610, 674, 816, 874, 1032, 1388, 1708, 1952, 1980, 2072, 2138, 2294, 2368, 2602, 2832, 2994, or 3104, or to the reference sequence corresponding to SEQ ID NO: 4, 172, 376, 508, 524, 584, 610, 674, 816, 874, 1032, 1388, 1708, 1952, 1980, 2072, 2138, 2294, 2368, 2602, 2832, 2994, or 3104, wherein the amino acid sequence comprises one or more substitutions relative to the reference sequence corresponding to residues 12-231 of SEQ ID NO: 4, 172, 376, 508, 524, 584, 610, 674, 816, 874, 1032, 1388, 1708, 1952, 1980, 2072, 2138, 2294, 2368, 2602, 2832, 2994, or 3104, or relative to the reference sequence corresponding to SEQ ID NO: 4, 172, 376, 508, 524, 584, 610, 674, 816, 874, 1032, 1388, 1708, 1952, 1980, 2072, 2138, 2294, 2368, 2602, 2832, 2994, or 3104.

[0484] In some embodiments, the recombinant polynucleotide comprises a polynucleotide sequence encoding an engineered adenylate kinase comprising an amino acid sequence having at least 70%, 75%, 80%, 81%, 82%, 83%, 84%, 85%, 86%, 87%, 88%, 89%, 90%, 91%, 92%, 93%, 94%, 95%, 96%, 97%, 98%, 99%, or more sequence identity to the reference sequence corresponding to residues 12-231 of an even-numbered SEQ ID NO. of SEQ ID NOs: 4-1302, 1356-2652, and 2676-3192, or to the reference sequence corresponding to an even-numbered SEQ ID NO. of SEQ ID NOs: 4-1302, 1356-2652, and 2676-3192, wherein the amino acid sequence comprises one or more substitutions relative to the reference sequence corresponding to residues 12-231 of SEQ ID NO: 4, 172, 376, 508, 524, 584, 610, 674, 816, 874, 1032, 1388, 1708, 1952, 1980, 2072, 2138, 2294, 2368, 2602, 2832, 2994, or 3104, or relative to the reference sequence corresponding to SEQ ID NO: 4, 172, 376, 508, 524, 584, 610, 674, 816, 874, 1032, 1388, 1708, 1952, 1980, 2072, 2138, 2294, 2368, 2602, 2832, 2994, or 3104.

[0485] In some embodiments, the recombinant polynucleotide comprises a polynucleotide sequence encoding an engineered adenylate kinase comprising an amino acid sequence comprising at least a substitution at amino acid position 11, 13, 14, 15, 16, 18, 20, 21, 22, 26, 27, 29, 30, 31, 32, 34, 35, 36, 37, 38, 39, 40, 42, 43, 44, 46, 48, 50, 51, 52, 53, 54, 55, 56, 57, 58, 59, 60, 61, 62, 63, 64, 65, 66, 67, 68, 69, 70, 71, 73, 74, 75, 76, 77, 78, 79, 80, 81, 82, 83, 84, 87, 88, 89, 90, 91, 92, 93, 94, 97, 98, 99, 100, 101, 102, 104, 105, 108, 109, 110, 111, 112, 113, 115, 116, 117, 118, 119, 120, 122, 123, 124, 125, 126, 127, 128, 129, 131, 132, 133, 134, 135, 136, 137, 138, 139, 140, 141, 142, 143, 146, 148, 149, 150, 151, 152, 153, 154, 155, 156, 157, 161, 162, 163, 166, 168, 169, 170, 172, 173, 175, 178, 179, 180, 181, 182, 183, 184, 186, 187, 188, 190, 191, 192, 194, 195, 196, 197, 198, 199, 200, 201, 202, 203, 204, 205, 206, 207, 208, 210, 211, 212, 213, 214, 215, 216, 217, 218, 219, 220, 221, 222, 223, 224, 225, 226, 227, 228, 229, 230, or 231, or combinations thereof, wherein the amino acid positions are relative to the reference sequence corresponding to residues 12-231 of SEQ ID NO: 4, 172, 376, 508, 524, 584, 610, 674, 816, 874, 1032, 1388, 1708, 1952, 1980, 2072, 2138, 2294, 2368, 2602, 2832, 2994, or 3104, or relative to the reference sequence corresponding to SEQ ID NO: 4, 172, 376, 508, 524, 584, 610, 674, 816, 874, 1032, 1388, 1708, 1952, 1980, 2072, 2138, 2294, 2368, 2602, 2832, 2994, or 3104.

[0486] In some embodiments, the recombinant polynucleotide comprises a polynucleotide sequence encoding an engineered adenylate kinase comprising an amino acid sequence comprising at least a substitution at amino acid position 13, 18, 29, 30, 31, 32, 34, 35, 48, 50, 53, 55, 59, 60, 61, 62, 66, 68, 77, 78, 80, 83, 87, 100, 104, 105, 109, 118, 119, 127, 128, 133, 136, 139, 142, 143, 150, 151, 155, 157, 168, 170, 175, 184, 186, 190, 201, 207, 212, 213, 214, 216, 217, 218, 224, or 226, or combinations thereof, wherein the amino acid positions are relative to the reference sequence corresponding to residues 12-231 of SEQ ID NO: 4, 172, 376, 508, 524, 584, 610, 674, 816, 874, 1032, 1388, 1708, 1952, 1980, 2072, 2138, 2294, 2368, 2602, 2832, 2994, or 3104, or relative to the reference sequence corresponding to SEQ ID NO: 4, 172, 376, 508, 524, 584, 610, 674, 816, 874, 1032, 1388, 1708, 1952, 1980, 2072, 2138, 2294, 2368, 2602, 2832, 2994, or 3104.

[0487] In some embodiments, the recombinant polynucleotide comprises a polynucleotide sequence encoding an engineered adenylate kinase comprising an amino acid sequence having at least 70%, 75%, 80%, 81%, 82%, 83%, 84%, 85%, 86%, 87%, 88%, 89%, 90%, 91%, 92%, 93%, 94%, 95%, 96%, 97%, 98%, 99%, or more sequence identity to the reference sequence corresponding to residues 12-231 of SEQ ID NO: 4, or to the reference sequence corresponding to SEQ ID NO: 4, wherein the amino acid sequence comprises one or more substitutions relative to the reference sequence corresponding to residues 12-231 of SEQ ID NO: 4, or relative to the reference sequence corresponding to SEQ ID NO: 4.

[0488] In some embodiments, the recombinant polynucleotide comprises a polynucleotide sequence encoding an engineered adenylate kinase comprising an amino acid sequence having at least 70%, 75%, 80%, 81%, 82%, 83%, 84%, 85%, 86%, 87%, 88%, 89%, 90%, 91%, 92%, 93%, 94%, 95%, 96%, 97%, 98%, 99%, or more sequence identity to the reference sequence corresponding to residues 12-231 of an even-numbered SEQ ID NO. of SEQ ID NOs: 86-372, or to the reference sequence corresponding to an even-numbered SEQ ID NO. of SEQ ID NOs: 86-372, wherein the amino acid sequence comprises one or more substitutions relative to the reference sequence corresponding to residues 12-231 of SEQ ID NO: 4, or relative to the reference sequence corresponding to SEQ ID NO: 4.

[0489] In some embodiments, the recombinant polynucleotide comprises a polynucleotide sequence encoding an engineered adenylate kinase comprising an amino acid sequence comprising at least a substitution or substitution set at amino acid position(s) 100/101, 94, 179, 198, 57, 78, 68, 93, 77, 62, 14, 51, 118, 91, 163, 65, 173, 224, 66, 109, 60, 40/88, 191, 63, 68/170, 100, 108, 58, 180, 178, 199, 40, 80/203, 40/43, 39, 55, 110, 51/59, 155/226, 80, 219, 166, 202, 59, 38, 90, 80/184/203, 35, 222, 54, 111/153/155, 112, 175, 74, 105, 170, 117, 128, 61, 119, 155, 79, 220, 226, 108/155, 108/111, 111, 69/88, 43, 43/69/138, 40/43/88/134/178, 214, 80/82/184/219, 88/136, 16/40/43/88, 40/134, 88, 111/155, 223, 115, 190, 201, 126, 56, 216, 76, 69, 120, 116, 203, 194, or 138, wherein the amino acid sequence comprises one or more substitutions relative to the reference sequence corresponding to residues 12-231 of SEQ ID NO: 4, or relative to the reference sequence corresponding to SEQ ID NO: 4.

[0490] In some embodiments, the recombinant polynucleotide comprises a polynucleotide sequence encoding an engineered adenylate kinase comprising an amino acid sequence having at least 70%, 75%, 80%, 81%, 82%, 83%, 84%, 85%, 86%, 87%, 88%, 89%, 90%, 91%, 92%, 93%, 94%, 95%, 96%, 97%, 98%, 99%, or more sequence identity to the reference sequence corresponding to residues 12-231 of SEQ ID NO: 172, or to the reference sequence corresponding to SEQ ID NO: 172, wherein the amino acid sequence comprises one or more substitutions relative to the reference sequence corresponding to residues 12-231 of SEQ ID NO: 172, or relative to the reference sequence corresponding to SEQ ID NO: 172.

[0491] In some embodiments, the recombinant polynucleotide comprises a polynucleotide sequence encoding an engineered adenylate kinase comprising an amino acid sequence having at least 70%, 75%, 80%, 81%, 82%, 83%, 84%, 85%, 86%, 87%, 88%, 89%, 90%, 91%, 92%, 93%, 94%, 95%, 96%, 97%, 98%, 99%, or more sequence identity to the reference sequence corresponding to residues 12-231 of an even-numbered SEQ ID NO. of SEQ ID NOs: 374-444, or to the reference sequence corresponding to an even-numbered SEQ ID NO. of SEQ ID NOs: 374-444, wherein the amino acid sequence comprises one or more substitutions relative to the reference sequence corresponding to residues 12-231 of SEQ ID NO: 172, or relative to the reference sequence corresponding to SEQ ID NO: 172.

[0492] In some embodiments, the recombinant polynucleotide comprises a polynucleotide sequence encoding an engineered adenylate kinase comprising an amino acid sequence comprising at least a substitution or substitution set at amino acid position(s) 66/78, 78/80/224, 78, 65/66, 78/224, 78/80/109, 40/60/94/226, 66/68, 78/80, 94/117/118/226, 68/109, 68, 94/179, 51/66/68/224, 94/117, 51/66/68/78/224, 66, 118, 93/94/180, 109, 68/224, 40/62/93, 93, 51/66, 94/117/118, 198/220, 93/117, 117/118, 93/198, 68/173, 40/117, 224, 40/118/226, 93/94, or 40/62/118, wherein the amino acid sequence comprises one or more substitutions relative to the reference sequence corresponding to residues 12-231 of SEQ ID NO: 172, or relative to the reference sequence corresponding to SEQ ID NO: 172.

[0493] In some embodiments, the recombinant polynucleotide comprises a polynucleotide sequence encoding an engineered adenylate kinase comprising an amino acid sequence having at least 70%, 75%, 80%, 81%, 82%, 83%, 84%, 85%, 86%, 87%, 88%, 89%, 90%, 91%, 92%, 93%, 94%, 95%, 96%, 97%, 98%, 99%, or more sequence identity to the reference sequence corresponding to residues 12-231 of SEQ ID NO: 376, or to the reference sequence corresponding to SEQ ID NO: 376, wherein the amino acid sequence comprises one or more substitutions relative to the reference sequence corresponding to residues 12-231 of SEQ ID NO: 376, or relative to the reference sequence corresponding to SEQ ID NO: 376.

[0494] In some embodiments, the recombinant polynucleotide comprises a polynucleotide sequence encoding an engineered adenylate kinase comprising an amino acid sequence having at least 70%, 75%, 80%, 81%, 82%, 83%, 84%, 85%, 86%, 87%, 88%, 89%, 90%, 91%, 92%, 93%, 94%, 95%, 96%, 97%, 98%, 99%, or more sequence identity to the reference sequence corresponding to residues 12-231 of an even-numbered SEQ ID NO. of SEQ ID NOs: 446-510, or to the reference sequence corresponding to an even-numbered SEQ ID NO. of SEQ ID NOs: 446-510, wherein the amino acid sequence comprises one or more substitutions relative to the reference sequence corresponding to residues 12-231 of SEQ ID NO: 376, or relative to the reference sequence corresponding to SEQ ID NO: 376.

[0495] In some embodiments, the recombinant polynucleotide comprises a polynucleotide sequence encoding an engineered adenylate kinase comprising an amino acid sequence comprising at least a substitution or substitution set at amino acid position(s) 13, 60, 126, 104, 201, 59, 55, 133, 61, 53, 190, 57, 62, 181, 168, 54, 173, 170, 34, 183, 14, 60/62/124/170, 60/170, or 60/62, wherein the amino acid positions are relative to the reference sequence corresponding to residues 12-231 of SEQ ID NO: 376, or relative to the reference sequence corresponding to SEQ ID NO: 376.

[0496] In some embodiments, the recombinant polynucleotide comprises a polynucleotide sequence encoding an engineered adenylate kinase comprising an amino acid sequence having at least 70%, 75%, 80%, 81%, 82%, 83%, 84%, 85%, 86%, 87%, 88%, 89%, 90%, 91%, 92%, 93%, 94%, 95%, 96%, 97%, 98%, 99%, or more sequence identity to the reference sequence corresponding to residues 12-231 of SEQ ID NO: 508, or to the reference sequence corresponding to SEQ ID NO: 508, wherein the amino acid sequence comprises one or more substitutions relative to the reference sequence corresponding to residues 12-231 of SEQ ID NO: 508, or relative to the reference sequence corresponding to SEQ ID NO: 508.

[0497] In some embodiments, the recombinant polynucleotide comprises a polynucleotide sequence encoding an engineered adenylate kinase comprising an amino acid sequence having at least 70%, 75%, 80%, 81%, 82%, 83%, 84%, 85%, 86%, 87%, 88%, 89%, 90%, 91%, 92%, 93%, 94%, 95%, 96%, 97%, 98%, 99%, or more sequence identity to the reference sequence corresponding to residues 12-231 of an even-numbered SEQ ID NO. of SEQ ID NOs: 512-580, or to the reference sequence corresponding to an even-numbered SEQ ID NO. of SEQ ID NOs: 512-580, wherein the amino acid sequence comprises one or more substitutions relative to the reference sequence corresponding to residues 12-231 of SEQ ID NO: 508, or relative to the reference sequence corresponding to SEQ ID NO: 508.

[0498] In some embodiments, the recombinant polynucleotide comprises a polynucleotide sequence encoding an engineered adenylate kinase comprising an amino acid sequence comprising at least a substitution or substitution set at amino acid position(s) 15, 15/68, 15/181, 13/15, 13/15/201, 54/55, 55/133, 55/133/197, 54/55/133/197, 68, 54/133/197, 54/197, 13/15/68, 34, 54, 133, 120, 34/133, 13/15/181, 55, 15/59, 68/181, 201, 181, 66, 15/59/181, 197, 13/15/59, 61, 34/61, 13, 34/69, or 163, wherein the amino acid positions are relative to the reference sequence corresponding to residues 12-231 of SEQ ID NO: 508, or relative to the reference sequence corresponding to SEQ ID NO: 508.

[0499] In some embodiments, the recombinant polynucleotide comprises a polynucleotide sequence encoding an engineered adenylate kinase comprising an amino acid sequence having at least 70%, 75%, 80%, 81%, 82%, 83%, 84%, 85%, 86%, 87%, 88%, 89%, 90%, 91%, 92%, 93%, 94%, 95%, 96%, 97%, 98%, 99%, or more sequence identity to the reference sequence corresponding to residues 12-231 of SEQ ID NO: 524, or to the reference sequence corresponding to SEQ ID NO: 524, wherein the amino acid sequence comprises one or more substitutions relative to the reference sequence corresponding to residues 12-231 of SEQ ID NO: 524, or relative to the reference sequence corresponding to SEQ ID NO: 524.

[0500] In some embodiments, the recombinant polynucleotide comprises a polynucleotide sequence encoding an engineered adenylate kinase comprising an amino acid sequence having at least 70%, 75%, 80%, 81%, 82%, 83%, 84%, 85%, 86%, 87%, 88%, 89%, 90%, 91%, 92%, 93%, 94%, 95%, 96%, 97%, 98%, 99%, or more sequence identity to the reference sequence corresponding to residues 12-231 of an even-numbered SEQ ID NO. of SEQ ID NOs: 582-608, or to the reference sequence corresponding to an even-numbered SEQ ID NO. of SEQ ID NOs: 582-608, wherein the amino acid sequence comprises one or more substitutions relative to the reference sequence corresponding to residues 12-231 of SEQ ID NO: 524, or relative to the reference sequence corresponding to SEQ ID NO: 524.

[0501] In some embodiments, the recombinant polynucleotide comprises a polynucleotide sequence encoding an engineered adenylate kinase comprising an amino acid sequence comprising at least a substitution or substitution set at amino acid position(s) 120, 61/201, 34, 36, 105, 112, 31, or 146, wherein the amino acid positions are relative to the reference sequence corresponding to residues 12-231 of SEQ ID NO: 524, or relative to the reference sequence corresponding to SEQ ID NO: 524.

[0502] In some embodiments, the recombinant polynucleotide comprises a polynucleotide sequence encoding an engineered adenylate kinase comprising an amino acid sequence having at least 70%, 75%, 80%, 81%, 82%, 83%, 84%, 85%, 86%, 87%, 88%, 89%, 90%, 91%, 92%, 93%, 94%, 95%, 96%, 97%, 98%, 99%, or more sequence identity to the reference sequence corresponding to residues 12-231 of SEQ ID NO: 584, or to the reference sequence corresponding to SEQ ID NO: 584, wherein the amino acid sequence comprises one or more substitutions relative to the reference sequence corresponding to residues 12-231 of SEQ ID NO: 584, or relative to the reference sequence corresponding to SEQ ID NO: 584.

[0503] In some embodiments, the recombinant polynucleotide comprises a polynucleotide sequence encoding an engineered adenylate kinase comprising an amino acid sequence having at least 70%, 75%, 80%, 81%, 82%, 83%, 84%, 85%, 86%, 87%, 88%, 89%, 90%, 91%, 92%, 93%, 94%, 95%, 96%, 97%, 98%, 99%, or more sequence identity to the reference sequence corresponding to residues 12-231 of an even-numbered SEQ ID NO. of SEQ ID NOs: 610-666, or to the reference sequence corresponding to an even-numbered SEQ ID NO. of SEQ ID NOs: 610-666, wherein the amino acid sequence comprises one or more substitutions relative to the reference sequence corresponding to residues 12-231 of SEQ ID NO: 584, or relative to the reference sequence corresponding to SEQ ID NO: 584.

[0504] In some embodiments, the recombinant polynucleotide comprises a polynucleotide sequence encoding an engineered adenylate kinase comprising an amino acid sequence comprising at least a substitution or substitution set at amino acid position(s) 13/30/31/53/109/119/168, 36/126/190, 126, 36/39/126, 126/190, 36/126, 36/190, 39/126, 13/109/119, 109, 36/120/190, 126/148, 190, 108/126, 30/31, 13/118/182, 31/53, 39, 119, 13/119/168, 53/168, 34, 34/65/146, 36/39, 119/168, 34/112, or 173, wherein the amino acid positions are relative to the reference sequence corresponding to residues 12-231 of SEQ ID NO: 584, or relative to the reference sequence corresponding to SEQ ID NO: 584.

[0505] In some embodiments, the recombinant polynucleotide comprises a polynucleotide sequence encoding an engineered adenylate kinase comprising an amino acid sequence having at least 70%, 75%, 80%, 81%, 82%, 83%, 84%, 85%, 86%, 87%, 88%, 89%, 90%, 91%, 92%, 93%, 94%, 95%, 96%, 97%, 98%, 99%, or more sequence identity to the reference sequence corresponding to residues 12-231 of SEQ ID NO: 610, or to the reference sequence corresponding to SEQ ID NO: 610, wherein the amino acid sequence comprises one or more substitutions relative to the reference sequence corresponding to residues 12-231 of SEQ ID NO: 610, or relative to the reference sequence corresponding to SEQ ID NO: 610.

[0506] In some embodiments, the recombinant polynucleotide comprises a polynucleotide sequence encoding an engineered adenylate kinase comprising an amino acid sequence having at least 70%, 75%, 80%, 81%, 82%, 83%, 84%, 85%, 86%, 87%, 88%, 89%, 90%, 91%, 92%, 93%, 94%, 95%, 96%, 97%, 98%, 99%, or more sequence identity to the reference sequence corresponding to residues 12-231 of an even-numbered SEQ ID NO. of SEQ ID NOs: 668-780, or to the reference sequence corresponding to an even-numbered SEQ ID NO. of SEQ ID NOs: 668-780, wherein the amino acid sequence comprises one or more substitutions relative to the reference sequence corresponding to residues 12-231 of SEQ ID NO: 610, or relative to the reference sequence corresponding to SEQ ID NO: 610.

[0507] In some embodiments, the recombinant polynucleotide comprises a polynucleotide sequence encoding an engineered adenylate kinase comprising an amino acid sequence comprising at least a substitution or substitution set at amino acid position(s) 190, 115/126/190, 126/190, 34/35/105, 126, 59/126, 34/105/116/146, 48, 66, 59, 148, 82, 100, 27, 135, 77, 138, 52, 68, 139, 184, 81, 65, 153, 50, 181, 214, 172, 69, or 154, wherein the amino acid positions are relative to the reference sequence corresponding to residues 12-231 of SEQ ID NO: 610, or relative to the reference sequence corresponding to SEQ ID NO: 610.

[0508] In some embodiments, the recombinant polynucleotide comprises a polynucleotide sequence encoding an engineered adenylate kinase comprising an amino acid sequence having at least 70%, 75%, 80%, 81%, 82%, 83%, 84%, 85%, 86%, 87%, 88%, 89%, 90%, 91%, 92%, 93%, 94%, 95%, 96%, 97%, 98%, 99%, or more sequence identity to the reference sequence corresponding to residues 12-231 of SEQ ID NO: 674, or to the reference sequence corresponding to SEQ ID NO: 674, wherein the amino acid sequence comprises one or more substitutions relative to the reference sequence corresponding to residues 12-231 of SEQ ID NO: 674, or relative to the reference sequence corresponding to SEQ ID NO: 674.

[0509] In some embodiments, the recombinant polynucleotide comprises a polynucleotide sequence encoding an engineered adenylate kinase comprising an amino acid sequence having at least 70%, 75%, 80%, 81%, 82%, 83%, 84%, 85%, 86%, 87%, 88%, 89%, 90%, 91%, 92%, 93%, 94%, 95%, 96%, 97%, 98%, 99%, or more sequence identity to the reference sequence corresponding to residues 12-231 of an even-numbered SEQ ID NO. of SEQ ID NOs: 782-868, or to the reference sequence corresponding to an even-numbered SEQ ID NO. of SEQ ID NOs: 782-868, wherein the amino acid sequence comprises one or more substitutions relative to the reference sequence corresponding to residues 12-231 of SEQ ID NO: 674, or relative to the reference sequence corresponding to SEQ ID NO: 674.

[0510] In some embodiments, the recombinant polynucleotide comprises a polynucleotide sequence encoding an engineered adenylate kinase comprising an amino acid sequence comprising at least a substitution or substitution set at amino acid position(s) 81/148/219, 68/148/219, 68/81/219, 148/219, 81/219, 136/138/139, 68/219, 66/68/219, 66/148/219, 66/68/148, 59, 59/135, 219, 59/139, 138, 126/148/219, 59/181, 81, 66/81/219, 126/219, 66/68/81/148/219, 181, 27/148, 135/136/139, 148, 59/135/138/181, 59/135/136/138/139, 59/135/136/138/181, 27, 27/126/148, 135/136/138, 68/81/126/148/219, 136, 68, 126/148, or 138/139, wherein the amino acid positions are relative to the reference sequence corresponding to residues 12-231 of SEQ ID NO: 674, or relative to the reference sequence corresponding to SEQ ID NO: 674.

[0511] In some embodiments, the recombinant polynucleotide comprises a polynucleotide sequence encoding an engineered adenylate kinase comprising an amino acid sequence having at least 70%, 75%, 80%, 81%, 82%, 83%, 84%, 85%, 86%, 87%, 88%, 89%, 90%, 91%, 92%, 93%, 94%, 95%, 96%, 97%, 98%, 99%, or more sequence identity to the reference sequence corresponding to residues 12-231 of SEQ ID NO: 816, or to the reference sequence corresponding to SEQ ID NO: 816, wherein the amino acid sequence comprises one or more substitutions relative to the reference sequence corresponding to residues 12-231 of SEQ ID NO: 816, or relative to the reference sequence corresponding to SEQ ID NO: 816.

[0512] In some embodiments, the recombinant polynucleotide comprises a polynucleotide sequence encoding an engineered adenylate kinase comprising an amino acid sequence having at least 70%, 75%, 80%, 81%, 82%, 83%, 84%, 85%, 86%, 87%, 88%, 89%, 90%, 91%, 92%, 93%, 94%, 95%, 96%, 97%, 98%, 99%, or more sequence identity to the reference sequence corresponding to residues 12-231 of an even-numbered SEQ ID NO. of SEQ ID NOs: 870-1014, or to the reference sequence corresponding to an even-numbered SEQ ID NO. of SEQ ID NOs: 870-1014, wherein the amino acid sequence comprises one or more substitutions relative to the reference sequence corresponding to residues 12-231 of SEQ ID NO: 816, or relative to the reference sequence corresponding to SEQ ID NO: 816.

[0513] In some embodiments, the recombinant polynucleotide comprises a polynucleotide sequence encoding an engineered adenylate kinase comprising an amino acid sequence comprising at least a substitution or substitution set at amino acid position(s) 48/100/148, 48/66/148/219, 48/100, 48/100/135/136, 48/66/77/100/135/136/148, 48/100/136, 48/135/148, 48/148, 48/136/148, 48/135, 48/135/136, 66/100, 48/66/219, 48/135/219, 100/148, 48/136/219, 48/219, 48/135/148/219, 100/135/136, 100/136, 66/77/100/136/219, 100/135, 48/77/100/135/136, 100, 77/100/135, 48/66/100/135/136/148/219, 52/184, 66, 52/68, 136/148, 126/184, 148, 184, 52, 135/136/148, 126/138/184, 27/184, 27/126, 27/126/148, 27, 27/126/184, 66/100/135/219, 27/68, 52/68/81/126, 48/66/136/148, 66/136/148, 66/135, 66/136, 66/135/219, 136, 135/148/219, 68/126, 66/148/219, 27/68/126, 27/68/184, 126, 68/81/126, 77/135, 135/136, 77/136, 77/148, 82, 138/184, 77/135/136, 27/138, 81, 81/126, 27/126/138, 68, or 81/138, wherein the amino acid positions are relative to the reference sequence corresponding to residues 12-231 of SEQ ID NO: 816, or relative to the reference sequence corresponding to SEQ ID NO: 816.

[0514] In some embodiments, the recombinant polynucleotide comprises a polynucleotide sequence encoding an engineered adenylate kinase comprising an amino acid sequence having at least 70%, 75%, 80%, 81%, 82%, 83%, 84%, 85%, 86%, 87%, 88%, 89%, 90%, 91%, 92%, 93%, 94%, 95%, 96%, 97%, 98%, 99%, or more sequence identity to the reference sequence corresponding to residues 12-231 of SEQ ID NO: 874, or to the reference sequence corresponding to SEQ ID NO: 874, wherein the amino acid sequence comprises one or more substitutions relative to the reference sequence corresponding to residues 12-231 of SEQ ID NO: 874, or relative to the reference sequence corresponding to SEQ ID NO: 874.

[0515] In some embodiments, the recombinant polynucleotide comprises a polynucleotide sequence encoding an engineered adenylate kinase comprising an amino acid sequence having at least 70%, 75%, 80%, 81%, 82%, 83%, 84%, 85%, 86%, 87%, 88%, 89%, 90%, 91%, 92%, 93%, 94%, 95%, 96%, 97%, 98%, 99%, or more sequence identity to the reference sequence corresponding to residues 12-231 of an even-numbered SEQ ID NO. of SEQ ID NOs: 1016-1302, or to the reference sequence corresponding to an even-numbered SEQ ID NO. of SEQ ID NOs: 1016-1302, wherein the amino acid sequence comprises one or more substitutions relative to the reference sequence corresponding to residues 12-231 of SEQ ID NO: 874, or relative to the reference sequence corresponding to SEQ ID NO: 874.

[0516] In some embodiments, the recombinant polynucleotide comprises a polynucleotide sequence encoding an engineered adenylate kinase comprising an amino acid sequence comprising at least a substitution or substitution set at amino acid position(s) 32/60/135/175/225, 32/81/127/128/135/175/225, 83/175/225, 135/175/225, 54/84/190, 55/190/212, 32/60/81/83/127/128/135/225, 175/225, 32/127/175, 84/190/212, 32/128/175, 81/175, 21/54, 54/55/212, 32/175/225, 128/175/225, 62/84/190, 81/135/225, 21/54/62/190/212, 60/81/83/175, 55/84/190, 32/81/83/135/225, 175, 62/212, 32/81/83, 32/81/225, 54/55/84/212, 55/190, 62/179, 54/84/179/212, 54/55/62/84, 81/135, 32/81/135, 179/190/212, 55/62, 100, 21/54/62/190, 190/212, 128/175, 21/62/190, 54/179/190, 54/190, 21/55/190, 21/54/62, 21/84, 21/55, 21/62, 21/179, 55/62/190/212, 54/62/84, 127/128/175/225, 54/62, 100/104, 54/55, 21/55/212, 62, 55/84, 55/62/212, 21/84/190, 225, 21/54/179/190, 83/135, 32/175, 21/54/78/190, 55/62/179/190/212, 21/54/190, 21/55/84/190, 62/84, 21/55/62, 21/62/84, 135, 32/60/81/127, 21/54/55/62/78, 54/84, 55/62/179/190, 54/55/62/84/179/190/212, 190, 83, 78, 54/62/190, 21/55/62/179/190, 32/60/127, 54/62/84/190/212, 21/62/179, 127/128/225, 32/225, 32/60/81, 81, 54, 21, 60/81/128/175, 84, 21/190/212, 60/128/225, 179, 21/55/62/190, 128, 60, 212, 55, 127, 32, 80, 220, 62/78/179, 55/62/84, 21/55/190/212, 32/127/128/225, 21/54/55/84/179, 21/190, 32/60/81/83/128/135, 127/128, or 21/55/179, wherein the amino acid positions are relative to the reference sequence corresponding to residues 12-231 of SEQ ID NO: 874, or relative to the reference sequence corresponding to SEQ ID NO: 874.

[0517] In some embodiments, the recombinant polynucleotide comprises a polynucleotide sequence encoding an engineered adenylate kinase comprising an amino acid sequence having at least 70%, 75%, 80%, 81%, 82%, 83%, 84%, 85%, 86%, 87%, 88%, 89%, 90%, 91%, 92%, 93%, 94%, 95%, 96%, 97%, 98%, 99%, or more sequence identity to the reference sequence corresponding to residues 12-231 of SEQ ID NO: 1032, or to the reference sequence corresponding to SEQ ID NO: 1032, wherein the amino acid sequence comprises one or more substitutions relative to the reference sequence corresponding to residues 12-231 of SEQ ID NO: 1032, or relative to the reference sequence corresponding to SEQ ID NO: 1032.

[0518] In some embodiments, the recombinant polynucleotide comprises a polynucleotide sequence encoding an engineered adenylate kinase comprising an amino acid sequence having at least 70%, 75%, 80%, 81%, 82%, 83%, 84%, 85%, 86%, 87%, 88%, 89%, 90%, 91%, 92%, 93%, 94%, 95%, 96%, 97%, 98%, 99%, or more sequence identity to the reference sequence corresponding to residues 12-231 of an even-numbered SEQ ID NO. of SEQ ID NOs: 1356-1552, or to the reference sequence corresponding to an even-numbered SEQ ID NO. of SEQ ID NOs: 1356-1552, wherein the amino acid sequence comprises one or more substitutions relative to the reference sequence corresponding to residues 12-231 of SEQ ID NO: 1032, or relative to the reference sequence corresponding to SEQ ID NO: 1032.

[0519] In some embodiments, the recombinant polynucleotide comprises a polynucleotide sequence encoding an engineered adenylate kinase comprising an amino acid sequence comprising at least a substitution or substitution set at amino acid position(s) 54/80/225, 55/80/180, 54/55/80/208/225, 84/128/155/190/212, 62/155/190, 83/84/155/190, 62/128/135/190, 225, 84/155/190, 128/190, 190/212, 83/84/155, 54/208/225, 84/155/190, 84/212, 84/123/155/212, 62/128/190, 55/80/208/225, 155/190, 83/84/190/212, 83/128/155/190/212, 55/180/225, 84/190/212, 54/80/180/208/225, 80/208, 135/155/190, 212, 80/180/208, 128/135/190/212, 128/155/212, 80/208/225, 83/212, 62/84/155/190, 54/179/225, 84, 83/84/190, 128/212, 54/55/80/208, 55, 62/128, 54/80/208/225, 62/83/84/190, 179/225, 190, 80/169/208, 62/128/212, 80, 62, 54/55/80/225, 54/80/180/208, 83/84/128/190/212, 62/83/190, 62/190, 80/179, 80/180, 54/80, 62/83/84/128/190/212, 83/84/135/212, 54/80/179/208, 62/84/128, 11/62/84/128/190/212, 80/179/208, 80/225, 62/84/128/190/212, 62/84/212, 80/179/180/208/225, 62/135, 55/208, 62/84, 128/135/190, 55/208/225, 84/128/190, 62/84/128/190, 62/135/212, 54/179/180/225, 62/84/135/212, 135, 54/55/225, 55/80/179/180, 84/135/190, 84/128, 54, 84/128/135, 54/179/208/225, 55/179/225, 128, 62/83/84/155/190, 84/135, 84/128/155, 55/179/180, 83/84/128/190, or 54/55/179/225, wherein the amino acid positions are relative to the reference sequence corresponding to residues 12-231 of SEQ ID NO: 1032, or relative to the reference sequence corresponding to SEQ ID NO: 1032.

[0520] In some embodiments, the recombinant polynucleotide comprises a polynucleotide sequence encoding an engineered adenylate kinase comprising an amino acid sequence having at least 70%, 75%, 80%, 81%, 82%, 83%, 84%, 85%, 86%, 87%, 88%, 89%, 90%, 91%, 92%, 93%, 94%, 95%, 96%, 97%, 98%, 99%, or more sequence identity to the reference sequence corresponding to residues 12-231 of SEQ ID NO: 1388, or to the reference sequence corresponding to SEQ ID NO: 1388, wherein the amino acid sequence comprises one or more substitutions relative to the reference sequence corresponding to residues 12-231 of SEQ ID NO: 1388, or relative to the reference sequence corresponding to SEQ ID NO: 1388.

[0521] In some embodiments, the recombinant polynucleotide comprises a polynucleotide sequence encoding an engineered adenylate kinase comprising an amino acid sequence having at least 70%, 75%, 80%, 81%, 82%, 83%, 84%, 85%, 86%, 87%, 88%, 89%, 90%, 91%, 92%, 93%, 94%, 95%, 96%, 97%, 98%, 99%, or more sequence identity to the reference sequence corresponding to residues 12-231 of an even-numbered SEQ ID NO. of SEQ ID NOs: 1554-1786, or to the reference sequence corresponding to an even-numbered SEQ ID NO. of SEQ ID NOs: 1554-1786, wherein the amino acid sequence comprises one or more substitutions relative to the reference sequence corresponding to residues 12-231 of SEQ ID NO: 1388, or relative to the reference sequence corresponding to SEQ ID NO: 1388.

[0522] In some embodiments, the recombinant polynucleotide comprises a polynucleotide sequence encoding an engineered adenylate kinase comprising an amino acid sequence comprising at least a substitution or substitution set at amino acid position(s) 143, 228, 136, 82, 156, 205, 226, 150, 219, 217, 218, 68, 142, 212, 213, 79, 230, 207, 155, 227, 129, 210, 133, 151, 43, 204, 182, 82/136/150/217, 136/150, 79/81/143/156/212/228, 82/136, 79/81/143/212, 79/133/228, 81/143/156/212, 136/219, 82/136/226, 136/150/217, 133/156, 133/143/228, 150/217, 82/136/150, 81, 81/143, 81/133/228, 143/228, 212/228, 79/81, 133/228, 133/212, 136/217, 216, 215, or 127, wherein the amino acid positions are relative to the reference sequence corresponding to residues 12-231 of SEQ ID NO: 1388, or relative to the reference sequence corresponding to SEQ ID NO: 1388.

[0523] In some embodiments, the recombinant polynucleotide comprises a polynucleotide sequence encoding an engineered adenylate kinase comprising an amino acid sequence having at least 70%, 75%, 80%, 81%, 82%, 83%, 84%, 85%, 86%, 87%, 88%, 89%, 90%, 91%, 92%, 93%, 94%, 95%, 96%, 97%, 98%, 99%, or more sequence identity to the reference sequence corresponding to residues 12-231 of SEQ ID NO: 1708, or to the reference sequence corresponding to SEQ ID NO: 1708, wherein the amino acid sequence comprises one or more substitutions relative to the reference sequence corresponding to residues 12-231 of SEQ ID NO: 1708, or relative to the reference sequence corresponding to SEQ ID NO: 1708.

[0524] In some embodiments, the recombinant polynucleotide comprises a polynucleotide sequence encoding an engineered adenylate kinase comprising an amino acid sequence having at least 70%, 75%, 80%, 81%, 82%, 83%, 84%, 85%, 86%, 87%, 88%, 89%, 90%, 91%, 92%, 93%, 94%, 95%, 96%, 97%, 98%, 99%, or more sequence identity to the reference sequence corresponding to residues 12-231 of an even-numbered SEQ ID NO. of SEQ ID NOs: 1788-1968, or to the reference sequence corresponding to an even-numbered SEQ ID NO. of SEQ ID NOs: 1788-1968, wherein the amino acid sequence comprises one or more substitutions relative to the reference sequence corresponding to residues 12-231 of SEQ ID NO: 1708, or relative to the reference sequence corresponding to SEQ ID NO: 1708.

[0525] In some embodiments, the recombinant polynucleotide comprises a polynucleotide sequence encoding an engineered adenylate kinase comprising an amino acid sequence comprising at least a substitution or substitution set at amino acid position(s) 127, 143/155/219/228, 219, 127/142, 142/151/207/218, 143/213, 151/218, 127/142/218, 142/151, 143/155/205/213/228, 127/142/207, 127/216/218, 142/151/207, 143/219, 127/207, 127/218, 143/219/228, 127/216, 68/127/207, 143/155/212/228, 151, 143/213/228, 143/155/205, 151/207/216, 143/228, 68/127/207/218, 143/155, 143, 205/213/219, 155/212/219/228, 205/219/228, 143/205, 142/207, 143/205/219, 143/212/213, 127/207/218, 142, 127/142/151/207/218, 143/205/219/228, 205/213/228, 68/151/207, 68/127/142/207, 68/127, 218, 127/142/196, 142/207/218, 68/142/216, 68/127/216/218, 68/127/218, 151/216/218, 143/212/228, 127/142/151, 151/207, 127/142/216, 129/207/218, 68/142/151/207, 68/142/151, 151/207/218, 228, 155/213, 127/142/151/218, 127/151, 155/228, 68/142/207, 80/151/207, 205/228, 68/142/207/216/218, 68/218, 68/207, 216/218, 68/142, 212, 205, or 142/207/216/218, wherein the amino acid positions are relative to the reference sequence corresponding to residues 12-231 of SEQ ID NO: 1708, or relative to the reference sequence corresponding to SEQ ID NO: 1708.

[0526] In some embodiments, the recombinant polynucleotide comprises a polynucleotide sequence encoding an engineered adenylate kinase comprising an amino acid sequence having at least 70%, 75%, 80%, 81%, 82%, 83%, 84%, 85%, 86%, 87%, 88%, 89%, 90%, 91%, 92%, 93%, 94%, 95%, 96%, 97%, 98%, 99%, or more sequence identity to the reference sequence corresponding to residues 12-231 of SEQ ID NO: 1952, or to the reference sequence corresponding to SEQ ID NO: 1952, wherein the amino acid sequence comprises one or more substitutions relative to the reference sequence corresponding to residues 12-231 of SEQ ID NO: 1952, or relative to the reference sequence corresponding to SEQ ID NO: 1952.

[0527] In some embodiments, the recombinant polynucleotide comprises a polynucleotide sequence encoding an engineered adenylate kinase comprising an amino acid sequence having at least 70%, 75%, 80%, 81%, 82%, 83%, 84%, 85%, 86%, 87%, 88%, 89%, 90%, 91%, 92%, 93%, 94%, 95%, 96%, 97%, 98%, 99%, or more sequence identity to the reference sequence corresponding to residues 12-231 of an even-numbered SEQ ID NO. of SEQ ID NOs: 1970-2032, or to the reference sequence corresponding to an even-numbered SEQ ID NO. of SEQ ID NOs: 1970-2032, wherein the amino acid sequence comprises one or more substitutions relative to the reference sequence corresponding to residues 12-231 of SEQ ID NO: 1952, or relative to the reference sequence corresponding to SEQ ID NO: 1952.

[0528] In some embodiments, the recombinant polynucleotide comprises a polynucleotide sequence encoding an engineered adenylate kinase comprising an amino acid sequence comprising at least a substitution or substitution set at amino acid position(s) 18/118, 87/119/192, 119/173/192, 118, 87/119, 18/118/170, 18, 119, 192, 87, 89, 59, 170, 64, 112, 93, 184, 146, 51, 125, 192, 191, 117, 172, or 163, wherein the amino acid positions are relative to the reference sequence corresponding to residues 12-231 of SEQ ID NO: 1952, or relative to the reference sequence corresponding to SEQ ID NO: 1952.

[0529] In some embodiments, the recombinant polynucleotide comprises a polynucleotide sequence encoding an engineered adenylate kinase comprising an amino acid sequence having at least 70%, 75%, 80%, 81%, 82%, 83%, 84%, 85%, 86%, 87%, 88%, 89%, 90%, 91%, 92%, 93%, 94%, 95%, 96%, 97%, 98%, 99%, or more sequence identity to the reference sequence corresponding to residues 12-231 of SEQ ID NO: 1980, or to the reference sequence corresponding to SEQ ID NO: 1980, wherein the amino acid sequence comprises one or more substitutions relative to the reference sequence corresponding to residues 12-231 of SEQ ID NO: 1980, or relative to the reference sequence corresponding to SEQ ID NO: 1980.

[0530] In some embodiments, the recombinant polynucleotide comprises a polynucleotide sequence encoding an engineered adenylate kinase comprising an amino acid sequence having at least 70%, 75%, 80%, 81%, 82%, 83%, 84%, 85%, 86%, 87%, 88%, 89%, 90%, 91%, 92%, 93%, 94%, 95%, 96%, 97%, 98%, 99%, or more sequence identity to the reference sequence corresponding to residues 12-231 of an even-numbered SEQ ID NO. of SEQ ID NOs: 2034-2134, or to the reference sequence corresponding to an even-numbered SEQ ID NO. of SEQ ID NOs: 2034-2134, wherein the amino acid sequence comprises one or more substitutions relative to the reference sequence corresponding to residues 12-231 of SEQ ID NO: 1980, or relative to the reference sequence corresponding to SEQ ID NO: 1980.

[0531] In some embodiments, the recombinant polynucleotide comprises a polynucleotide sequence encoding an engineered adenylate kinase comprising an amino acid sequence comprising at least a substitution or substitution set at amino acid position(s) 87/119/192, 87/192, 87/119, 119/192, 192, 119, 146/192, 87, 59/87, 59/87/112/146, 146, 87/112/119, 74, 75, 66, 181, 81, 73, 77, 188, 216, 82, 136, 214, 21, 217, 154, 133, 71, 212, or 228, wherein the amino acid positions are relative to the reference sequence corresponding to residues 12-231 of SEQ ID NO: 1980, or relative to the reference sequence corresponding to SEQ ID NO: 1980.

[0532] In some embodiments, the recombinant polynucleotide comprises a polynucleotide sequence encoding an engineered adenylate kinase comprising an amino acid sequence having at least 70%, 75%, 80%, 81%, 82%, 83%, 84%, 85%, 86%, 87%, 88%, 89%, 90%, 91%, 92%, 93%, 94%, 95%, 96%, 97%, 98%, 99%, or more sequence identity to the reference sequence corresponding to residues 12-231 of SEQ ID NO: 2072, or to the reference sequence corresponding to SEQ ID NO: 2072, wherein the amino acid sequence comprises one or more substitutions relative to the reference sequence corresponding to residues 12-231 of SEQ ID NO: 2072, or relative to the reference sequence corresponding to SEQ ID NO: 2072.

[0533] In some embodiments, the recombinant polynucleotide comprises a polynucleotide sequence encoding an engineered adenylate kinase comprising an amino acid sequence having at least 70%, 75%, 80%, 81%, 82%, 83%, 84%, 85%, 86%, 87%, 88%, 89%, 90%, 91%, 92%, 93%, 94%, 95%, 96%, 97%, 98%, 99%, or more sequence identity to the reference sequence corresponding to residues 12-231 of an even-numbered SEQ ID NO. of SEQ ID NOs: 2136-2264, or to the reference sequence corresponding to an even-numbered SEQ ID NO. of SEQ ID NOs: 2136-2264, wherein the amino acid sequence comprises one or more substitutions relative to the reference sequence corresponding to residues 12-231 of SEQ ID NO: 2072, or relative to the reference sequence corresponding to SEQ ID NO: 2072.

[0534] In some embodiments, the recombinant polynucleotide comprises a polynucleotide sequence encoding an engineered adenylate kinase comprising an amino acid sequence comprising at least a substitution or substitution set at amino acid position(s) 87, 194, 197, 93, 202, 38, 91, 183, 39, 146, 203, 37, 92, 36, 89, 131, 132, 90, 148, 35/197, 231, or 56, wherein the amino acid positions are relative to the reference sequence corresponding to residues 12-231 of SEQ ID NO: 2072, or relative to the reference sequence corresponding to SEQ ID NO: 2072.

[0535] In some embodiments, the recombinant polynucleotide comprises a polynucleotide sequence encoding an engineered adenylate kinase comprising an amino acid sequence having at least 70%, 75%, 80%, 81%, 82%, 83%, 84%, 85%, 86%, 87%, 88%, 89%, 90%, 91%, 92%, 93%, 94%, 95%, 96%, 97%, 98%, 99%, or more sequence identity to the reference sequence corresponding to residues 12-231 of SEQ ID NO: 2138, or to the reference sequence corresponding to SEQ ID NO: 2138, wherein the amino acid sequence comprises one or more substitutions relative to the reference sequence corresponding to residues 12-231 of SEQ ID NO: 2138, or relative to the reference sequence corresponding to SEQ ID NO: 2138.

[0536] In some embodiments, the recombinant polynucleotide comprises a polynucleotide sequence encoding an engineered adenylate kinase comprising an amino acid sequence having at least 70%, 75%, 80%, 81%, 82%, 83%, 84%, 85%, 86%, 87%, 88%, 89%, 90%, 91%, 92%, 93%, 94%, 95%, 96%, 97%, 98%, 99%, or more sequence identity to the reference sequence corresponding to residues 12-231 of an even-numbered SEQ ID NO. of SEQ ID NOs: 2266-2366, or to the reference sequence corresponding to an even-numbered SEQ ID NO. of SEQ ID NOs: 2266-2366, wherein the amino acid sequence comprises one or more substitutions relative to the reference sequence corresponding to residues 12-231 of SEQ ID NO: 2138, or relative to the reference sequence corresponding to SEQ ID NO: 2138.

[0537] In some embodiments, the recombinant polynucleotide comprises a polynucleotide sequence encoding an engineered adenylate kinase comprising an amino acid sequence comprising at least a substitution or substitution set at amino acid position(s) 161, 162, 153, 216, 212, 156, 214, 229, 77/143/214/216, 143/156/216, 77/143, 77/143/216, 77/214/216, 77/216, 143/156, 156/216, 143, 77, 77/214, 77/143/161/162/212/214, 77/162/214/216, 77/143/156/214/216, 77/143/156/162/212/216, 77/143/156/161/214/216, 77/156/162/216, 156/161/214/216, 77/143/162/214/216, 143/216, 214/216, 143/156/214/216, 143/214/216, 77/143/212/216, 143/156/161/162/216, 156/162/214, 77/143/156/161/162, 143/161/214/216, 77/161/216, or 143/212/214/216, wherein the amino acid positions are relative to the reference sequence corresponding to residues 12-231 of SEQ ID NO: 2138, or relative to the reference sequence corresponding to SEQ ID NO: 2138.

[0538] In some embodiments, the recombinant polynucleotide comprises a polynucleotide sequence encoding an engineered adenylate kinase comprising an amino acid sequence having at least 70%, 75%, 80%, 81%, 82%, 83%, 84%, 85%, 86%, 87%, 88%, 89%, 90%, 91%, 92%, 93%, 94%, 95%, 96%, 97%, 98%, 99%, or more sequence identity to the reference sequence corresponding to residues 12-231 of SEQ ID NO: 2294, or to the reference sequence corresponding to SEQ ID NO: 2294, wherein the amino acid sequence comprises one or more substitutions relative to the reference sequence corresponding to residues 12-231 of SEQ ID NO: 2294, or relative to the reference sequence corresponding to SEQ ID NO: 2294.

[0539] In some embodiments, the recombinant polynucleotide comprises a polynucleotide sequence encoding an engineered adenylate kinase comprising an amino acid sequence having at least 70%, 75%, 80%, 81%, 82%, 83%, 84%, 85%, 86%, 87%, 88%, 89%, 90%, 91%, 92%, 93%, 94%, 95%, 96%, 97%, 98%, 99%, or more sequence identity to the reference sequence corresponding to residues 12-231 of an even-numbered SEQ ID NO. of SEQ ID NOs: 2368-2594, or to the reference sequence corresponding to an even-numbered SEQ ID NO. of SEQ ID NOs: 2368-2594, wherein the amino acid sequence comprises one or more substitutions relative to the reference sequence corresponding to residues 12-231 of SEQ ID NO: 2294, or relative to the reference sequence corresponding to SEQ ID NO: 2294.

[0540] In some embodiments, the recombinant polynucleotide comprises a polynucleotide sequence encoding an engineered adenylate kinase comprising an amino acid sequence comprising at least a substitution at amino acid position 80, 105, 228, 50, 175, 170, 82, 173, 65, 53, 184, 122, 195, 68, 89, 34, 118, 119, 87, 179, 117, 113, 54, 190, 216, 88, 36, 166, 38, 169, 66, 142, 136, 131, 187, 40, 74, 127, 55, 148, 215, 64, 155, 116, 90, 132, 60, 94, 112, 120, 37, 108, 35, 51, 61, 212, 172, 59, or 56, or combinations thereof, wherein the amino acid positions are relative to the reference sequence corresponding to residues 12-231 of SEQ ID NO: 2294, or relative to the reference sequence corresponding to SEQ ID NO: 2294.

[0541] In some embodiments, the recombinant polynucleotide comprises a polynucleotide sequence encoding an engineered adenylate kinase comprising an amino acid sequence having at least 70%, 75%, 80%, 81%, 82%, 83%, 84%, 85%, 86%, 87%, 88%, 89%, 90%, 91%, 92%, 93%, 94%, 95%, 96%, 97%, 98%, 99%, or more sequence identity to the reference sequence corresponding to residues 12-231 of SEQ ID NO: 2368, or to the reference sequence corresponding to SEQ ID NO: 2368, wherein the amino acid sequence comprises one or more substitutions relative to the reference sequence corresponding to residues 12-231 of SEQ ID NO: 2368, or relative to the reference sequence corresponding to SEQ ID NO: 2368.

[0542] In some embodiments, the recombinant polynucleotide comprises a polynucleotide sequence encoding an engineered adenylate kinase comprising an amino acid sequence having at least 70%, 75%, 80%, 81%, 82%, 83%, 84%, 85%, 86%, 87%, 88%, 89%, 90%, 91%, 92%, 93%, 94%, 95%, 96%, 97%, 98%, 99%, or more sequence identity to the reference sequence corresponding to residues 12-231 of an even-numbered SEQ ID NO. of SEQ ID NOs: 2596-2652 or 2676-2714, or to the reference sequence corresponding to an even-numbered SEQ ID NO. of SEQ ID NOs: 2596-2652 or 2676-2714, wherein the amino acid sequence comprises one or more substitutions relative to the reference sequence corresponding to residues 12-231 of SEQ ID NO: 2368, or relative to the reference sequence corresponding to SEQ ID NO: 2368.

[0543] In some embodiments, the recombinant polynucleotide comprises a polynucleotide sequence encoding an engineered adenylate kinase comprising an amino acid sequence comprising at least a substitution or substitution set at amino acid position(s) 20, 21, 22, 43, 44, 46, 48, 138, 181, 182, 136/228, 82/142/173/184/216, 184/216, 50/184/216, 127/173/184, 105/136/170/175/228, 105/175, 50/184, 105/170/175/228, 50/127/173/184, 50/142/184/216, 50/82/127/216, 50, 50/82/173/216, 50/127/142/184/216, 50/82/127, 105/136, 105/228, 105/136/175/228, 173/216, 50/173, 228, 127/173, 105/136/170/195, 50/82/216, 175/228, or 50/82/127/142/184/216, wherein the amino acid positions are relative to the reference sequence corresponding to residues 12-231 of SEQ ID NO: 2368, or relative to the reference sequence corresponding to SEQ ID NO: 2368.

[0544] In some embodiments, the recombinant polynucleotide comprises a polynucleotide sequence encoding an engineered adenylate kinase comprising an amino acid sequence having at least 70%, 75%, 80%, 81%, 82%, 83%, 84%, 85%, 86%, 87%, 88%, 89%, 90%, 91%, 92%, 93%, 94%, 95%, 96%, 97%, 98%, 99%, or more sequence identity to the reference sequence corresponding to residues 12-231 of SEQ ID NO: 2602, or to the reference sequence corresponding to SEQ ID NO: 2602, wherein the amino acid sequence comprises one or more substitutions relative to the reference sequence corresponding to residues 12-231 of SEQ ID NO: 2602, or relative to the reference sequence corresponding to SEQ ID NO: 2602.

[0545] In some embodiments, the recombinant polynucleotide comprises a polynucleotide sequence encoding an engineered adenylate kinase comprising an amino acid sequence having at least 70%, 75%, 80%, 81%, 82%, 83%, 84%, 85%, 86%, 87%, 88%, 89%, 90%, 91%, 92%, 93%, 94%, 95%, 96%, 97%, 98%, 99%, or more sequence identity to the reference sequence corresponding to residues 12-231 of an even-numbered SEQ ID NO. of SEQ ID NOs: 2716-2988, or to the reference sequence corresponding to an even-numbered SEQ ID NO. of SEQ ID NOs: 2716-2988, wherein the amino acid sequence comprises one or more substitutions relative to the reference sequence corresponding to residues 12-231 of SEQ ID NO: 2602, or relative to the reference sequence corresponding to SEQ ID NO: 2602.

[0546] In some embodiments, the recombinant polynucleotide comprises a polynucleotide sequence encoding an engineered adenylate kinase comprising at least a substitution or substitution set at amino acid position(s) 18, 18/56, 20, 21, 26, 27, 29, 30, 32, 42, 43, 50, 66, 67, 69, 70, 80, 98, 99, 102, 135, 137, 139, 141, 142, 143, 148, 149, 152, 153, 156, 173, 184, or 216, wherein the amino acid positions are relative to the reference sequence corresponding to residues 12-231 of SEQ ID NO: 2602, or relative to the reference sequence corresponding to SEQ ID NO: 2602.

[0547] In some embodiments, the recombinant polynucleotide comprises a polynucleotide sequence encoding an engineered adenylate kinase comprising at least a substitution or substitution set at amino acid position(s) 65, 65/104, 65/104/105/116/127, 65/104/105/127/136, 65/104/136, 65/104/136/170, 65/105/116/136/170, 65/105/127/136, 65/105/127/136/175, 65/105/127/170, 65/105/127/175, 65/105/136, 65/105/136/170, 65/105/170, 65/116, 65/127/136, 65/127/136/170, 65/127/170, 94/173, 94/187, 104/105, 104/105/127, 104/105/127/136/175/195, 104/105/136/170, 104/127, 104/127/136/170, 104/127/136/175, 105, 105/116/127/136/170/175, 105/127/136, 105/127/136/195, 105/136, 105/136/195, 116/127/136/175, 127/195, 132, 136, or 170, wherein the amino acid positions are relative to the reference sequence corresponding to residues 12-231 of SEQ ID NO: 2602, or relative to the reference sequence corresponding to SEQ ID NO: 2602.

[0548] In some embodiments, the recombinant polynucleotide comprises a polynucleotide sequence encoding an engineered adenylate kinase comprising at least a substitution at amino acid position 36, 37, 40, 50, 59, 89, 117, 120, 128, 168, or 203, or combinations thereof, wherein the amino acid positions are relative to the reference sequence corresponding to residues 12-231 of SEQ ID NO: 2602, or relative to the reference sequence corresponding to SEQ ID NO: 2602.

[0549] In some embodiments, the recombinant polynucleotide comprises a polynucleotide sequence encoding an engineered adenylate kinase comprising an amino acid sequence having at least 70%, 75%, 80%, 81%, 82%, 83%, 84%, 85%, 86%, 87%, 88%, 89%, 90%, 91%, 92%, 93%, 94%, 95%, 96%, 97%, 98%, 99%, or more sequence identity to the reference sequence corresponding to residues 12-231 of SEQ ID NO: 2832, or to the reference sequence corresponding to SEQ ID NO: 2832, wherein the amino acid sequence comprises one or more substitutions relative to the reference sequence corresponding to residues 12-231 of SEQ ID NO: 2832, or relative to the reference sequence corresponding to SEQ ID NO: 2832.

[0550] In some embodiments, the recombinant polynucleotide comprises a polynucleotide sequence encoding an engineered adenylate kinase comprising an amino acid sequence having at least 70%, 75%, 80%, 81%, 82%, 83%, 84%, 85%, 86%, 87%, 88%, 89%, 90%, 91%, 92%, 93%, 94%, 95%, 96%, 97%, 98%, 99%, or more sequence identity to the reference sequence corresponding to residues 12-231 of an even-numbered SEQ ID NO. of SEQ ID NOs: 2990-3032, or to the reference sequence corresponding to an even-numbered SEQ ID NO. of SEQ ID NOs: 2990-3032, wherein the amino acid sequence comprises one or more substitutions relative to the reference sequence corresponding to residues 12-231 of SEQ ID NO: 2832, or relative to the reference sequence corresponding to SEQ ID NO: 2832.

[0551] In some embodiments, the recombinant polynucleotide comprises a polynucleotide sequence encoding an engineered adenylate kinase comprising at least a substitution or substitution set at amino acid position(s) 36, 36/50, 36/50/89/93/110, 36/50/89/93/139, 36/50/89/139/170, 36/50/89/172, 36/89, 36/170, 50, 50/89/93, 50/89/93/139, 50/93, 50/170, 89/170/172, 90/104, 90/151/157, 104/151/154, 104/151/154/157, 104/154/157/216, 151/157, 151/216, or 216, wherein the amino acid positions are relative to the reference sequence corresponding to residues 12-231 of SEQ ID NO: 2832, or relative to the reference sequence corresponding to SEQ ID NO: 2832.

[0552] In some embodiments, the recombinant polynucleotide comprises a polynucleotide sequence encoding an engineered adenylate kinase comprising an amino acid sequence having at least 70%, 75%, 80%, 81%, 82%, 83%, 84%, 85%, 86%, 87%, 88%, 89%, 90%, 91%, 92%, 93%, 94%, 95%, 96%, 97%, 98%, 99%, or more sequence identity to the reference sequence corresponding to residues 12-231 of SEQ ID NO: 2994, or to the reference sequence corresponding to SEQ ID NO: 2994, wherein the amino acid sequence comprises one or more substitutions relative to the reference sequence corresponding to residues 12-231 of SEQ ID NO: 2994, or relative to the reference sequence corresponding to SEQ ID NO: 2994.

[0553] In some embodiments, the recombinant polynucleotide comprises a polynucleotide sequence encoding an engineered adenylate kinase comprising an amino acid sequence having at least 70%, 75%, 80%, 81%, 82%, 83%, 84%, 85%, 86%, 87%, 88%, 89%, 90%, 91%, 92%, 93%, 94%, 95%, 96%, 97%, 98%, 99%, or more sequence identity to the reference sequence corresponding to residues 12-231 of an even-numbered SEQ ID NO. of SEQ ID NOs: 3034-3150, or to the reference sequence corresponding to an even-numbered SEQ ID NO. of SEQ ID NOs: 3034-3150, wherein the amino acid sequence comprises one or more substitutions relative to the reference sequence corresponding to residues 12-231 of SEQ ID NO: 2994, or relative to the reference sequence corresponding to SEQ ID NO: 2994.

[0554] In some embodiments, the recombinant polynucleotide comprises a polynucleotide sequence encoding an engineered adenylate kinase comprising at least a substitution or substitution set at amino acid position(s) 50, 58, 59, 68, 74, 76, 79, 80, 83, 90, 112, 113, 119, 157, 170, 172, 182, 184, 217, 224, 226, 228, 229, 230, or 231, wherein the amino acid positions are relative to the reference sequence corresponding to residues 12-231 of SEQ ID NO: 2994, or relative to the reference sequence corresponding to SEQ ID NO: 2994.

[0555] In some embodiments, the recombinant polynucleotide comprises a polynucleotide sequence encoding an engineered adenylate kinase comprising at least a substitution or substitution set at amino acid position(s) 79/104/157/228, 79/157/228/229, 79/157/229, 79/228, 83/104, 83/104/151/168/173/190, 83/113, 83/173/190, 83/173/190/201, 83/173/201, 83/190, 83/190/201/216, 83/216, 104/157, 157/173/190/216, 157/183, 157/190, 157/190/216, 157/228, 173/216, or 201/216, wherein the amino acid positions are relative to the reference sequence corresponding to residues 12-231 of SEQ ID NO: 2994, or relative to the reference sequence corresponding to SEQ ID NO: 2994.

[0556] In some embodiments, the recombinant polynucleotide comprises a polynucleotide sequence encoding an engineered adenylate kinase comprising an amino acid sequence having at least 70%, 75%, 80%, 81%, 82%, 83%, 84%, 85%, 86%, 87%, 88%, 89%, 90%, 91%, 92%, 93%, 94%, 95%, 96%, 97%, 98%, 99%, or more sequence identity to the reference sequence corresponding to residues 12-231 of SEQ ID NO: 3104, or to the reference sequence corresponding to SEQ ID NO: 3104, wherein the amino acid sequence comprises one or more substitutions relative to the reference sequence corresponding to residues 12-231 of SEQ ID NO: 3104, or relative to the reference sequence corresponding to SEQ ID NO: 3104.

[0557] In some embodiments, the recombinant polynucleotide comprises a polynucleotide sequence encoding an engineered adenylate kinase comprising an amino acid sequence having at least 70%, 75%, 80%, 81%, 82%, 83%, 84%, 85%, 86%, 87%, 88%, 89%, 90%, 91%, 92%, 93%, 94%, 95%, 96%, 97%, 98%, 99%, or more sequence identity to the reference sequence corresponding to residues 12-231 of an even-numbered SEQ ID NO. of SEQ ID NOs: 3152-3192, or to the reference sequence corresponding to an even-numbered SEQ ID NO. of SEQ ID NOs: 3152-3192, wherein the amino acid sequence comprises one or more substitutions relative to the reference sequence corresponding to residues 12-231 of SEQ ID NO: 3104, or relative to the reference sequence corresponding to SEQ ID NO: 3104.

[0558] In some embodiments, the recombinant polynucleotide comprises a polynucleotide sequence encoding an engineered adenylate kinase comprising an amino acid sequence of the engineered adenylate kinase comprises at least a substitution or substitution set at amino acid position(s) 104, 104/157, 104/157/190/228, 104/170/228, 104/157/228/229, 104/157/229, 104/170/190, 104/170/190/228, 104/190, 104/190/201, 104/190/228, 104/201/228, 104/228/229, 157/228, 157/228/229, 170/190/228, 170/190/228/229, 190, 190/229, 201/228, or 228, wherein the amino acid positions are relative to the reference sequence corresponding to residues 12-231 of SEQ ID NO: 3104, or relative to the reference sequence corresponding to SEQ ID NO: 3104.

[0559] In some embodiments, the recombinant polynucleotide comprises a polynucleotide sequence encoding an engineered adenylate kinase comprising an amino acid sequence comprising at least a substitution at an amino acid position set forth in Tables 7.2, 8.2, 9.2, 10.2, 11.2, 12.1, 13.2, 14.1, 15.2, 16.2, 17.2, 18.2, 19.2, 20.2, 21.2, 23.2, 24.2, 25.2, 26.2, 27.2, 28.2, 29.2, 30.2, 31.2, 32.2, 33.2, 34.2, 35.2, 36.2, 37.2, 38.2, 40.2, 41.2, 42.2, 43.2, 44.2, 45.2, 46.2, 47.2, 48.2, and 49.2, wherein the amino acid positions are relative to the reference sequence corresponding to SEQ ID NO: 2, 4, 172, 376, 508, 524, 584, 610, 674, 816, 874, 1032, 1388, 1708, 1952, 1980, 2072, 2138, 2294, 2368, 2602, 2832, 2994, or 3104.

[0560] In some embodiments, the recombinant polynucleotide comprises a polynucleotide sequence encoding an engineered adenylate kinase comprising an amino acid sequence comprising at least one substitution set forth in Tables 7.2, 8.2, 9.2, 10.2, 11.2, 12.1, 13.2, 14.1, 15.2, 16.2, 17.2, 18.2, 19.2, 20.2, 21.2, 23.2, 24.2, 25.2, 26.2, 27.2, 28.2, 29.2, 30.2, 31.2, 32.2, 33.2, 34.2, 35.2, 36.2, 37.2, 38.2, 40.2, 41.2, 42.2, 43.2, 44.2, 45.2, 46.2, 47.2, 48.2, and 49.2, wherein the amino acid positions are relative to the reference sequence corresponding to SEQ ID NO: 2, 4, 172, 376, 508, 524, 584, 610, 674, 816, 874, 1032, 1388, 1708, 1952, 1980, 2072, 2138, 2294, 2368, 2602, 2832, 2994, or 3104.

[0561] In some embodiments, the recombinant polynucleotide comprises a polynucleotide sequence encoding an engineered adenylate kinase comprising an amino acid sequence comprising at least a substitution or substitution set at amino acid position(s) set forth in Tables 7.2, 8.2, 9.2, 10.2, 11.2, 12.1, 13.2, 14.1, 15.2, 16.2, 17.2, 18.2, 19.2, 20.2, 21.2, 23.2, 24.2, 25.2, 26.2, 27.2, 28.2, 29.2, 30.2, 31.2, 32.2, 33.2, 34.2, 35.2, 36.2, 37.2, 38.2, 40.2, 41.2, 42.2, 43.2, 44.2, 45.2, 46.2, 47.2, 48.2, and 49.2, wherein the amino acid positions are relative to the reference sequence corresponding to SEQ ID NO: 2, 4, 172, 376, 508, 524, 584, 610, 674, 816, 874, 1032, 1388, 1708, 1952, 1980, 2072, 2138, 2294, 2368, 2602, 2832, 2994, or 3104.

[0562] In some embodiments, the recombinant polynucleotide comprises a polynucleotide sequence encoding an engineered adenylate kinase comprising an amino acid sequence comprising at least a substitution or substitution set of an engineered adenylate kinase variant set forth in Tables 7.2, 8.2, 9.2, 10.2, 11.2, 12.1, 13.2, 14.1, 15.2, 16.2, 17.2, 18.2, 19.2, 20.2, 21.2, 23.2, 24.2, 25.2, 26.2, 27.2, 28.2, 29.2, 30.2, 31.2, 32.2, 33.2, 34.2, 35.2, 36.2, 37.2, 38.2, 40.2, 41.2, 42.2, 43.2, 44.2, 45.2, 46.2, 47.2, 48.2, and 49.2, wherein the amino acid positions are relative to the reference sequence corresponding to SEQ ID NO: 2, 4, 172, 376, 508, 524, 584, 610, 674, 816, 874, 1032, 1388, 1708, 1952, 1980, 2072, 2138, 2294, 2368, 2602, 2832, 2994, or 3104.

[0563] In some embodiments, the recombinant polynucleotide comprises a polynucleotide sequence encoding an engineered adenylate kinase comprising an amino acid sequence having at least 70%, 75%, 80%, 81%, 82%, 83%, 84%, 85%, 86%, 87%, 88%, 89%, 90%, 91%, 92%, 93%, 94%, 95%, 96%, 97%, 98%, 99% or more sequence identity to a reference amino acid sequence comprising a substitution or substitution set of an engineered adenylate kinase variant set forth in Tables 7.2, 8.2, 9.2, 10.2, 11.2, 12.1, 13.2, 14.1, 15.2, 16.2, 17.2, 18.2, 19.2, 20.2, 21.2, 23.2, 24.2, 25.2, 26.2, 27.2, 28.2, 29.2, 30.2, 31.2, 32.2, 33.2, 34.2, 35.2, 36.2, 37.2, 38.2, 40.2, 41.2, 42.2, 43.2, 44.2, 45.2, 46.2, 47.2, 48.2, and 49.2, wherein the amino acid positions are relative to the reference sequence corresponding to SEQ ID NO: 2, 4, 172, 376, 508, 524, 584, 610, 674, 816, 874, 1032, 1388, 1708, 1952, 1980, 2072, 2138, 2294, 2368, 2602, 2832, 2994, or 3104.

[0564] In some embodiments, the recombinant polynucleotide comprises a polynucleotide sequence encoding an engineered adenylate kinase comprising an amino acid sequence comprising residues 12-231 of an even-numbered SEQ ID NO. of SEQ ID NOs: 4-1302, 1356-2652, and 2676-3192, or comprising an even-numbered SEQ ID NO. of SEQ ID NOs: 4-1302, 1356-2652, and 2676-3192.

[0565] In some embodiments, the recombinant polynucleotide comprises a polynucleotide sequence encoding an engineered adenylate kinase comprising an amino acid sequence comprising residues 12-231 of SEQ ID NO: 4, 172, 376, 508, 524, 584, 610, 674, 816, 874, 1032, 1388, 1708, 1952, 1980, 2072, 2138, 2294, 2368, 2602, 2832, 2994, or 3104, or wherein the amino acid sequence comprises SEQ ID NO: 4, 172, 376, 508, 524, 584, 610, 674, 816, 874, 1032, 1388, 1708, 1952, 1980, 2072, 2138, 2294, 2368, 2602, 2832, 2994, or 3104.

[0566] In some embodiments, the recombinant polynucleotide comprises a polynucleotide sequence having at least 70%, 75%, 80%, 81%, 82%, 83%, 84%, 85%, 86%, 87%, 88%, 89%, 90%, 91%, 92%, 93%, 94%, 95%, 96%, 97%, 98%, 99%, or more sequence identity to a reference polynucleotide sequence corresponding to nucleotide residues 34-693 of SEQ ID NO: 1, 3, 171, 375, 507, 523, 583, 609, 673, 815, 873, 1031, 1387, 1707, 1951, 1979, 2071, 2137, 2293, 2367, 2601, 2831, 2993, or3103, or to a reference polynucleotide sequence corresponding to SEQ ID NO: 1, 3, 171, 375, 507, 523, 583, 609, 673, 815, 873, 1031, 1387, 1707, 1951, 1979, 2071, 2137, 2293, 2367, 2601, 2831, 2993, or 3103, wherein the recombinant polynucleotide encodes an adenylate kinase.

[0567] In some embodiments, the recombinant polynucleotide comprises a polynucleotide sequence having at least 70%, 75%, 80%, 81%, 82%, 83%, 84%, 85%, 86%, 87%, 88%, 89%, 90%, 91%, 92%, 93%, 94%, 95%, 96%, 97%, 98%, 99%, or more sequence identity to a reference polynucleotide sequence corresponding to nucleotide residues 34-693 of an odd-numbered SEQ ID NO. of SEQ ID NOs: 3-1301, 1355-2651, and 2675-3191, or to a reference polynucleotide sequence corresponding to an odd-numbered SEQ ID NO. of SEQ ID NOs: 3-1301, 1355-2651, and 2675-3191, wherein the recombinant polynucleotide encodes an engineered adenylate kinase.

[0568] In some embodiments, the recombinant polynucleotide comprises a polynucleotide sequence comprising nucleotide residues 34-693 of SEQ ID NO: 1, 3, 171, 375, 507, 523, 583, 609, 673, 815, 873, 1031, 1387, 1707, 1951, 1979, 2071, 2137, 2293, 2367, 2601, 2831, 2993, or 3103, or comprising SEQ ID NO: 1, 3, 171, 375, 507, 523, 583, 609, 673, 815, 873, 1031, 1387, 1707, 1951, 1979, 2071, 2137, 2293, 2367, 2601, 2831, 2993, or 3103.

[0569] In some embodiments, the recombinant polynucleotide comprises a polynucleotide sequence comprising nucleotide residues 34-693 of an odd-numbered SEQ ID NO. of SEQ ID NOs: 3-1301, 1355-2651, and 2675-3191, or comprising an odd-numbered SEQ ID NO. of SEQ ID NOs: 3-1301, 1355-2651, and 2675-3191.

[0570] In some embodiments, the present disclosure provides a recombinant polynucleotide capable of hybridizing under highly stringent conditions to a reference polynucleotide encoding an engineered adenylate kinase polypeptide described herein, e.g., a recombinant polynucleotide provided in Tables 7.2, 8.2, 9.2, 10.2, 11.2, 12.1, 13.2, 14.1, 15.2, 16.2, 17.2, 18.2, 19.2, 20.2, 21.2, 23.2, 24.2, 25.2, 26.2, 27.2, 28.2, 29.2, 30.2, 31.2, 32.2, 33.2, 34.2, 35.2, 36.2, 37.2, 38.2, 40.2, 41.2, 42.2, 43.2, 44.2, 45.2, 46.2, 47.2, 48.2, and 49.2, or a reverse complement thereof. In some embodiments, the recombinant polynucleotide hybridizes under highly stringent conditions to a reference polynucleotide corresponding to nucleotide residues 34-693 of SEQ ID NO: 3, 171, 375, 507, 523, 583, 609, 673, 815, or 873, 1031, 1387, 1707, 1951, 1979, 2071, 2137, 2293, 2367, 2601, 2831, 2993, or 3103, or to a reference polynucleotide sequence corresponding to SEQ ID NO: 3, 171, 375, 507, 523, 583, 609, 673, 815, or 873, 1031, 1387, 1707, 1951, 1979, 2071, 2137, 2293, 2367, 2601, 2831, 2993, or 3103, orareverse complement thereof. In some embodiments, the recombinant polynucleotide hybridizes under highly stringent conditions to a reference polynucleotide corresponding to nucleotide residues 34-693 of an odd-numbered SEQ ID NO. of SEQ ID NOs: 3-1301, 1355-2651, and 2675-3191, or corresponding to an odd-numbered SEQ ID NO. of SEQ ID NOs: 3-1301, 1355-2651, and 2675-3191, or a reverse complement thereof.

[0571] In some embodiments, the present disclosure provides a recombinant polynucleotide capable of hybridizing under highly stringent conditions to a reverse complement of a reference polynucleotide encoding an engineered adenylate kinase polypeptide described herein, wherein the recombinant polynucleotide hybridizing under stringent conditions encodes an adenylate kinase polypeptide comprising an amino acid sequence having one or more amino acid differences as compared to SEQ ID NO: 2, 4, 172, 376, 508, 524, 584, 610, 674, 816, 874, 1032, 1388, 1708, 1952, 1980, 2072, 2138, 2294, 2368, 2602, 2832, 2994, or 3104, at residue positions selected from any positions as set forth in Tables 7.2, 8.2, 9.2, 10.2, 11.2, 12.1, 13.2, 14.1, 15.2, 16.2, 17.2, 18.2, 19.2, 20.2, 21.2, 23.2, 24.2, 25.2, 26.2, 27.2, 28.2, 29.2, 30.2, 31.2, 32.2, 33.2, 34.2, 35.2, 36.2, 37.2, 38.2, 40.2, 41.2, 42.2, 43.2, 44.2, 45.2, 46.2, 47.2, 48.2, and 49.2. In some embodiments, the recombinant polynucleotide that hybridizes under highly stringent conditions to a reverse complement of a reference polynucleotide encoding an engineered adenylate kinase polypeptide described herein encodes an adenylate kinase polypeptide having one or more amino acid differences present in an engineered adenylate kinase having an amino acid sequence corresponding to residues 12-231 of an even-numbered SEQ ID NO. of SEQ ID NOs: 3-1301, 1355-2651, and 2675-3191, or an amino acid sequence corresponding to an even-numbered SEQ ID NO. of SEQ ID NOs: 3-1301, 1355-2651, and 2675-3191, wherein the amino acid differences are relative to SEQ ID NO: 2, 4, 172, 376, 508, 524, 584, 610, 674, 816, 874, 1032, 1388, 1708, 1952, 1980, 2072, 2138, 2294, 2368, 2602, 2832, 2994, or 3104.

[0572] In some embodiments, the recombinant polynucleotide that hybridizes under highly stringent conditions comprises a polynucleotide sequence having at least 70%, 75%, 80%, 81%, 82%, 83%, 84%, 85%, 86%, 87%, 88%, 89%, 90%, 91%, 92%, 93%, 94%, 95%, 96%, 97%, 98%, 99% or more sequence identity to a reference polynucleotide sequence corresponding to nucleotide residues 34-693 of SEQ ID NO: 3, 171, 375, 507, 523, 583, 609, 673, 815, or 873, 1031, 1387, 1707, 1951, 1979, 2071, 2137, 2293, 2367, 2601, 2831, 2993, or 3103, or to a reference polynucleotide sequence corresponding to SEQ ID NO: 3, 171, 375, 507, 523, 583, 609, 673, 815, or 873, 1031, 1387, 1707, 1951, 1979, 2071, 2137, 2293, 2367, 2601, 2831, 2993, or 3103, or a reverse complement thereof. In some embodiments, the recombinant polynucleotide that hybridizes under highly stringent conditions comprises a polynucleotide sequence having at least 70%, 75%, 80%, 81%, 82%, 83%, 84%, 85%, 86%, 87%, 88%, 89%, 90%, 91%, 92%, 93%, 94%, 95%, 96%, 97%, 98%, 99% or more sequence identity to a reference polynucleotide sequence corresponding to nucleotide residues 34-693 of an odd-numbered SEQ ID NO. of SEQ ID NOs: 3-1301, 1355-2651, and 2675-3191, or an odd-numbered SEQ ID NO. of SEQ ID NOs: 3-1301, 1355-2651, and 2675-3191, or a reverse complement thereof.

[0573] In some additional embodiments, the polynucleotide hybridizing under highly stringent conditions comprises a polynucleotide sequence having at least 75%, 80%, 81%, 82%, 83%, 84%, 85%, 86%, 87%, 88%, 89%, 90%, 91%, 92%, 93%, 94%, 95%, 96%, 97%, 98%, 99% or more sequence identity to a reverse complement of a polynucleotide reference sequence corresponding to nucleotide residues 34-693 of SEQ ID NO: 3, 171, 375, 507, 523, 583, 609, 673, 815, or 873, 1031, 1387, 1707, 1951, 1979, 2071, 2137, 2293, 2367, 2601, 2831, 2993, or 3103, or to a reference polynucleotide sequence corresponding to SEQ ID NO: 3, 171, 375, 507, 523, 583, 609, 673, 815, or 873, 1031, 1387, 1707, 1951, 1979, 2071, 2137, 2293, 2367, 2601, 2831, 2993, or 3103 encodes an engineered adenylate kinase polypeptide. In some additional embodiments, the polynucleotide hybridizing under highly stringent conditions comprises a polynucleotide sequence having at least 75%, 80%, 81%, 82%, 83%, 84%, 85%, 86%, 87%, 88%, 89%, 90%, 91%, 92%, 93%, 94%, 95%, 96%, 97%, 98%, 99% or more sequence identity to a reverse complement of a polynucleotide reference sequence corresponding to nucleotide residues 34-693 of an odd-numbered SEQ ID NO. of SEQ ID NOs: 3-1301, 1355-2651, and 2675-3191, or an odd-numbered SEQ ID NO. of SEQ ID NOs: 3-1301, 1355-2651, and 2675-3191 encodes an engineered adenylate kinase polypeptide.

[0574] In some embodiments, the recombinant polynucleotide comprises a polynucleotide sequence encoding an adenylate kinase comprising an amino acid sequence comprising
[0575] (a) residues 12 to 228 of SEQ ID NO: 1336,
   [0576] residues 12 to 228 of SEQ ID NO: 1338,
   [0577] residues 12 to 225 of SEQ ID NO: 1340, or
   [0578] residues 12 to 228 of SEQ ID NO: 1342; or
[0579] (b) SEQ ID NO: 1336;
   [0580] SEQ ID NO: 1338;
   [0581] SEQ ID NO: 1340; or
   [0582] SEQ ID NO: 1342.

[0583] In some embodiments, the recombinant polynucleotide comprises a polynucleotide sequence comprising
[0584] (a) nucleotide residues 34 to 684 of SEQ ID NO: 1335;
   [0585] nucleotide residues 34 to 684 of SEQ ID NO: 1337;
   [0586] nucleotide residues 34 to 675 of SEQ ID NO: 1339; or
   [0587] nucleotide residues 34 to 684 of SEQ ID NO: 1341; or
[0588] (b) SEQ ID NO: 1335;
   [0589] SEQ ID NO: 1337;
   [0590] SEQ ID NO: 1339; or
   [0591] SEQ ID NO: 1341.

[0592] In some embodiments, a recombinant polynucleotide encoding any of the adenylate kinase provided herein is manipulated in a variety of ways to provide for expression of the polypeptide. In some embodiments, the recombinant polynucleotide encoding the polypeptides are provided as expression vectors where one or more control sequences is operably linked to the recombinant polynucleotide to regulate the expression of the polynucleotide and/or encoded polypeptide. The techniques for modifying polynucleotides and nucleic acid sequences utilizing recombinant DNA methods are known in the art.

[0593] In some embodiments, the control sequences include, among others, promoter sequences, Kozak sequence, leader sequences, polyadenylation sequences, pro-peptide sequences, signal peptide sequences, regulatory elements, and transcription terminators. As known in the art, suitable promoters can be selected based on the host cells used. For bacterial host cells, suitable promoters for directing transcription of the nucleic acid constructs of the present disclosure, include, but are not limited to promoters obtained from the E. coli lac operon, Streptomyces coelicolor agarase gene (dagA), Bacillus subtilis levansucrase gene (sacB), Bacillus licheniformis alpha-amylase gene (amyL), Bacillus stearothermophilus maltogenic amylase gene (amyM), Bacillus amyloliquefaciens alpha-amylase gene (amyQ), Bacillus licheniformis penicillinase gene (penP), Bacillus subtilis xylA and xylB genes, and prokaryotic beta-lactamase gene (See e.g., Villa-Kamaroff et al., Proc. Natl Acad. Sci. USA, 1978, 75:3727-3731), as well as the tac promoter (See e.g., DeBoer et al., Proc. Natl Acad. Sci. USA, 1983, 80: 21-25). Exemplary promoters for filamentous fungal host cells, include, but are not limited to promoters obtained from the genes for Aspergillus oryzae TAKA amylase, Rhizomucor miehei aspartic proteinase, Aspergillus niger neutral alpha-amylase, Aspergillus niger acid stable alpha-amylase, Aspergillus niger or Aspergillus awamori glucoamylase (glaA), Rhizomucor miehei lipase, Aspergillus oryzae alkaline protease, Aspergillus oryzae triose phosphate isomerase, Aspergillus nidulans acetamidase, and Fusarium oxysporum trypsin-like protease (See e.g., WO 96/00787), as well as the NA2-tpi promoter (a hybrid of the promoters from the genes for Aspergillus niger neutral alpha-amylase and Aspergillus oryzae triose phosphate isomerase), and mutant, truncated, and hybrid promoters thereof. Exemplary yeast cell promoters can be from the genes can be from the genes for Saccharomyces cerevisiae enolase (ENO-1), Saccharomyces cerevisiae galactokinase (GAL1), Saccharomyces cerevisiae alcohol dehydrogenase/glyceraldehyde-3-phosphate dehydrogenase (ADH2/GAP), and Saccharomyces cerevisiae 3-phosphoglycerate kinase. In some embodiments, promoters effective in Pichia cells are used. Other useful promoters for yeast host cells are known in the art (See e.g., Romanos et al., Yeast, 1992, 8:423-488). In some embodiments, for insect host cells, suitable promoters include, among others, baculovirus promoters (e.g., P10 and polyhedron promoters), OpIE2 promoter, and Nephotettix cincticeps actin promoters. In some embodiments, promoters effective in Pichia cells are used. In some embodiments, for insect host cells, suitable promoters include, among others, baculovirus promoters (e.g., P10 and polyhedron promoters), OpIE2 promoter, and Nephotettix cincticeps actin promoters. In some embodiments, for mammalian host cells, suitable promoters include, among others, promoters of cytomegalovirus (CMV), chicken β-actin promoter fused with the CMV enhancer, simian virus 40 (SV40), human phosphoglycerate kinase, beta actin, elongation factor-la or glyceraldehyde-3-phosphate dehydrogenase, or Gallus β-actin.

[0594] In some embodiments, the control sequence is also a suitable transcription terminator sequence (i.e., a sequence recognized by a host cell to terminate transcription). In some embodiments, the terminator sequence is operably linked to the 3′ terminus of the nucleic acid sequence encoding the leucine decarboxylase polypeptide. Any suitable terminator which is functional in the host cell of choice finds use in the present invention. For bacterial expression, the transcription terminators can be a Rho-dependent terminators that rely on a Rho transcription factor, or a Rho-independent, or intrinsic terminators, which do not require a transcription factor. Exemplary bacterial transcription terminators are described in Peters et al., J Mol Biol., 2011, 412(5):793-813. Exemplary transcription terminators for filamentous fungal host cells can be obtained from the genes for Aspergillus oryzae TAKA amylase, Aspergillus niger glucoamylase, Aspergillus nidulans anthranilate synthase, Aspergillus niger alpha-glucosidase, and Fusarium oxysporum trypsin-like protease. Exemplary terminators for yeast host cells can be obtained from the genes for Saccharomyces cerevisiae enolase, Saccharomyces cerevisiae cytochrome C (CYC1), and Saccharomyces cerevisiae glyceraldehyde-3-phosphate dehydrogenase. Other useful terminators for yeast host cells are known in the art (See e.g., Romanos et al., supra). Exemplary terminators for mammalian cells include, but are not limited to those from cytomegalovirus (CMV), Simian virus 40 (SV40), from Homo sapiens growth hormone hGH, from bovine growth hormone BGH, and from human or rabbit beta globulin.

[0595] In some embodiments, the control sequence is also a suitable leader sequence (i.e., a non-translated region of an mRNA that is important for translation by the host cell). In some embodiments, the leader sequence is operably linked to the 5′ terminus of the nucleic acid sequence encoding the adenylate kinase polypeptide. Any suitable leader sequence that is functional in the host cell of choice find use in the present invention. Exemplary leaders for filamentous fungal host cells are obtained from the genes for Aspergillus oryzae TAKA amylase, and Aspergillus nidulans triose phosphate isomerase. Suitable leaders for yeast host cells are obtained from the genes for Saccharomyces cerevisiae enolase (ENO-1), Saccharomyces cerevisiae 3-phosphoglycerate kinase, Saccharomyces cerevisiae alpha-factor, and Saccharomyces cerevisiae alcohol dehydrogenase/glyceraldehyde-3-phosphate dehydrogenase (ADH2/GAP). Suitable leaders for mammalian host cells include but are not limited to the 5′-UTR element present in orthopoxvirus mRNA.

[0596] In some embodiments, the control sequence comprises a 3′ untranslated nucleic acid region and polyadenylation tail nucleic acid sequence, sequences operably linked to the 3′ terminus of the protein coding nucleic acid sequence which mediate binding to proteins involved in mRNA trafficking and translation and mRNA half-life. Any polyadenylation sequence and 3′ UTR which is functional in the host cell of choice may be used in the present invention. Exemplary polyadenylation sequences for filamentous fungal host cells include, but are not limited to those from the genes for Aspergillus oryzae TAKA amylase, Aspergillus niger glucoamylase, Aspergillus nidulans anthranilate synthase, Fusarium oxysporum trypsin-like protease, and Aspergillus niger alpha-glucosidase. Useful polyadenylation sequences for yeast host cells are also known in the art (See e.g., Guo and Sherman, Mol. Cell. Biol., 1995, 15:5983-5990). Useful polyadenylation and 3′ UTR sequences for mammalian host cells include, but are not limited to, the 3′-UTRs of α- and β-globin mRNAs that harbor several sequence elements that increase the stability and translation of mRNA.

[0597] In some embodiments, the control sequence is a signal peptide (i.e., a coding region that codes for an amino acid sequence linked to the amino terminus of a polypeptide and directs the encoded polypeptide into the cell's secretory pathway). In some embodiments, the 5′ end of the coding sequence of the nucleic acid sequence inherently contains a signal peptide coding region naturally linked in translation reading frame with the segment of the coding region that encodes the secreted polypeptide. Alternatively, in some embodiments, the 5′ end of the coding sequence contains a signal peptide coding region that is foreign to the coding sequence. Any suitable signal peptide coding region which directs the expressed polypeptide into the secretory pathway of a host cell of choice finds use for expression of the engineered polypeptide(s). Effective signal peptide coding regions for bacterial host cells are the signal peptide coding regions include, but are not limited to those obtained from the genes for Bacillus NCIB 11837 maltogenic amylase, Bacillus stearothermophilus alpha-amylase, Bacillus licheniformis subtilisin, Bacillus licheniformis beta-lactamase, Bacillus stearothermophilus neutral proteases (nprT, nprS, nprM), and Bacillus subtilis prsA. Further signal peptides are known in the art (See e.g., Simonen and Palva, Microbiol. Rev., 1993, 57:109-137). In some embodiments, effective signal peptide coding regions for filamentous fungal host cells include, but are not limited to the signal peptide coding regions obtained from the genes for Aspergillus oryzae TAKA amylase, Aspergillus niger neutral amylase, Aspergillus niger glucoamylase, Rhizomucor miehei aspartic proteinase, Humicola insolens cellulase, and Humicola lanuginosa lipase. Useful signal peptides for yeast host cells include, but are not limited to those from the genes for Saccharomyces cerevisiae alpha-factor and Saccharomyces cerevisiae invertase. Useful signal peptides for mammalian host cells include but are not limited to, those from the genes for immunoglobulin gamma (IgG) and the signal peptide in a human secreted protein, such as human beta-galactosidase polypeptide.

[0598] In some embodiments, the control sequence is a regulatory sequence that facilitates the regulation of the expression of the recombinant polynucleotide and/or encoded polypeptide. Examples of regulatory systems are those that cause the expression of the gene to be turned on or off in response to a chemical or physical stimulus, including the presence of a regulatory compound. In prokaryotic host cells, suitable regulatory sequences include, but are not limited to the lac, tac, and trp operator systems. In yeast host cells, suitable regulatory systems include, but are not limited to the ADH2 system or GAL1 system. In filamentous fungi, suitable regulatory sequences include, but are not limited to the TAKA alpha-amylase promoter, Aspergillus niger glucoamylase promoter, and Aspergillus oryzae glucoamylase promoter. In mammalian cells, suitable regulatory systems include, among others, zinc-inducible sheep metallothionine (MT) promoter, dexamethasone (Dex)-inducible promoter, mouse mammary tumor virus (MMTV) promoter; ecdysone insect promoter, tetracycline-inducible promoter system, RU486-inducible promoter system, and the rapamycin-inducible promoter system.

[0599] In another aspect, the present disclosure provides an expression vector comprising a recombinant polynucleotide encoding an adenylate kinase polypeptide, where the recombinant polynucleotide is operably or operatively linked to a control sequence, such as a promoter and a terminator, a replication origin, etc., depending on the type of hosts into which they are to be introduced. The recombinant expression vector may be any suitable vector (e.g., a plasmid or virus), that can be conveniently subjected to recombinant DNA procedures and bring about the expression of the adenylate kinase polynucleotide sequence. The choice of the vector typically depends on the compatibility of the vector with the host cell into which the vector is to be introduced. The vectors may be linear or closed circular plasmids.

[0600] In some embodiments, the expression vector is an autonomously replicating vector (i.e., a vector that exists as an extra-chromosomal entity, the replication of which is independent of chromosomal replication, such as a plasmid, an extra-chromosomal element, a minichromosome, or an artificial chromosome). The vector may contain any means for assuring self-replication. In some alternative embodiments, the vector may be one which, when introduced into the host cell, is integrated into the genome and replicated together with the chromosome(s) into which it has been integrated. Furthermore, a single vector or plasmid or two or more vectors or plasmids which together contain the total DNA to be introduced into the genome of the host cell, or a transposon may be used.

[0601] In some embodiment, recombinant polynucleotides may be provided on a non-replicating expression vector or plasmid. In some embodiments, the non-replicating expression vector or plasmid can be based on viral vectors defective in replication (see, e.g., Travieso et al., npj Vaccines, 2022, Vol. 7, Article 75).

[0602] In some embodiments, the expression vector contains one or more selectable markers, which permit easy selection of transformed cells. A “selectable marker” is a gene, the product of which provides for biocide or viral resistance, resistance to heavy metals, prototrophy to auxotrophs, and the like. Examples of bacterial selectable markers include, but are not limited to the dal genes from Bacillus subtilis or Bacillus licheniformis, or markers, which confer antibiotic resistance such as ampicillin, kanamycin, chloramphenicol or tetracycline resistance. Suitable markers for yeast host cells include, but are not limited to ADE2, HIS3, LEU2, LYS2, MET3, TRP1, and URA3. Selectable markers for use in filamentous fungal host cells include, but are not limited to, amdS (acetamidase; e.g., from A. nidulans or A. orzyae), argB (ornithine carbamoyltransferases), bar (phosphinothricin acetyltransferase; e.g., from S. hygroscopicus), hph (hygromycin phosphotransferase), niaD (nitrate reductase), pyrG (orotidine-5′-phosphate decarboxylase; e.g., from A. nidulans or A. orzyae), sC (sulfate adenyltransferase), and trpC (anthranilate synthase), as well as equivalents thereof. Selectable marker for mammalian cells include, among others, chloramphenicol acetyl transferase (CAT), nourseothricin N-acetyl transferase, blasticidin-S deaminase, blastcidin S acetyltransferase, Sh ble (Zeocin® resistance), aminoglycoside 3′-phosphotransferase (neomycin resistance), hph (hygromycin resistance), thymidine kinase, and puromycin N-acetyl-transferase.

[0603] In another aspect, the present disclosure provides a host cell comprising at least one recombinant polynucleotide encoding an adenylate kinase polypeptide of the present disclosure, the recombinant polynucleotide(s) being operatively linked to one or more control sequences for expression of the adenylate kinase polypeptide. In some embodiments, the host cells suitable for use in expressing the polypeptides encoded by the expression vectors is a prokaryotic cell or eukaryotic cell known in the art. In some embodiments, the host cell is a bacterial cell, including, among others, E. coli, B. subtilis, Vibrio fluvialis, Streptomyces and Salmonella typhimurium cell. Exemplary bacterial host cells also include various Escherichia coli strains (e.g., W3110 (AfhuA) and BL21). In some embodiments, the host cell is a fungal cell, such as filamentous fungal cell or yeast cell. n some embodiments, suitable fungal host cells include, among others, Pichia, Saccharomyces, Yarrowia, Kluyveromyces, Aspergillus, Trichoderma, Neurospora, Mucor, Penicillium T. Trichoderma, or Myceliophthora fungal cell. Exemplary fungal host cell includes, among others, Pichia pastoris, Yarrowia lipolytica, Kluyveromyces marxianus, Kluyveromyces lactis, Aspergillus niger, Aspergillus oryzae, Aspergillus fumigatus Trichoderma reesei. Neurospora crassa, Mucor circinelloides, Penicillium chrysogenum T. reesei, Trichoderma harzianum, Saccharomyces cerevisiae, or Myceliophthora thermophile. In some embodiments, the host cell is an insect cell. In some embodiments, a suitable insect host cell is a lepidopteran or dipteran insect cell. Exemplary insect host cell includes, among others, Sf9 cell, Sf21 cell, Schneider 2 cell, and BTI-TN-5B1-4 (High Five) cell. In some embodiments, the host cell is a mammalian cell. In some embodiments, the host cell is a human cell or rodent cell. Exemplary mammalian cells include, among others, Expi293, HeLa, U2OS, A549, HT1080, CAD, P19, NIH 3T3, L929, Hek 293, 293F, 293E, 293T, COS, Vero, NS0, Sp2/0 cell, DUKX-X11, MCF-7, Y79, SO—Rb50, Hep G2, J558L, and CHO cell.

[0604] In another aspect, the present disclosure provides a method of producing the adenylate kinase polypeptides, where the method comprises culturing a host cell comprising an expression vector capable of expressing or producing the adenylate kinase polypeptide under suitable culture conditions such that the adenylate kinase polypeptide is expressed or produced. In some embodiments, the method comprises a step of isolating the adenylate kinase from the culture medium and/or host cell, as described herein. In some further embodiments, the method further comprises a step of purifying the expressed adenylate kinase polypeptide.

[0605] In some embodiments, the adenylate kinase polypeptide expressed in a host cell is recovered from the cells and/or the culture medium using any one or more of the well-known techniques for protein purification, including, among others, lysozyme or detergent treatment, sonication, filtration, salting-out, ultra-centrifugation, and chromatography, such as described herein.

[0606] Chromatographic techniques for isolation/purification of the adenylate kinase polypeptides include, among others, reverse phase chromatography, high-performance liquid chromatography, ion-exchange chromatography, hydrophobic-interaction chromatography, size-exclusion chromatography, gel electrophoresis, and affinity chromatography. Conditions for purifying the adenylate kinase depends, in part, on factors such as net charge, hydrophobicity, hydrophilicity, molecular weight, molecular shape, etc., and will be apparent to those having skill in the art. In some embodiments, affinity techniques may be used to isolate the adenylate kinase. For affinity chromatography purification, an antibody that specifically binds adenylate kinase polypeptide may be used. In some embodiments, an affinity tag, e.g., His-tag, can be introduced into the adenylate kinase polypeptide for purposes of isolation/purification.

[0607] Appropriate culture media and growth conditions for the above-described host cells are well known in the art. Polynucleotides for expression of the adenylate kinases may be introduced into cells by various methods known in the art. Techniques include, among others, electroporation, biolistic particle bombardment, liposome mediated transfection, calcium chloride transfection, and protoplast fusion.

[0608] In some embodiments, the polynucleotides encoding the adenylate kinase polypeptide can be prepared by standard solid-phase methods, according to known synthetic methods. In some embodiments, polynucleotide fragments can be individually synthesized, then joined (e.g., by enzymatic or chemical litigation methods, or polymerase mediated methods) to form any desired continuous sequence. For example, polynucleotides and oligonucleotides disclosed herein can be prepared by chemical synthesis using the classical phosphoramidite method (See e.g., Beaucage et al., Tetra. Lett., 1981, 22:1859-69; and Matthes et al., EMBO J., 1984, 3:801-05), as it is typically practiced in automated synthetic methods.

[0609] In some embodiments, a method for preparing the adenylate kinase can comprise: (a) synthesizing a polynucleotide encoding a polypeptide comprising an amino acid sequence selected from the amino acid sequence of an adenylate kinase, such as described in the Tables of the Examples, and (b) expressing the engineered adenylate kinase encoded by the polynucleotide. In some embodiments of the method, the amino acid sequence encoded by the polynucleotide can optionally have one or several (e.g., up to 3, 4, 5, or up to 10) amino acid residue deletions, insertions and/or substitutions. In some embodiments, the amino acid sequence has optionally 1-2, 1-3, 1-4, 1-5, 1-6, 1-7, 1-8, 1-9, 1-10, 1-15, 1-20, 1-21, 1-22, 1-23, 1-24, 1-25, 1-30, 1-35, 1-40, 1-45, or 1-50 amino acid residue deletions, insertions and/or substitutions. In some embodiments, the amino acid sequence has optionally 1, 2, 3, 4, 5, 6, 7, 8, 9, 10, 11, 12, 13, 14, 15, 16, 17, 18, 19, 20, 21, 22, 23, 24, 25, 30, 30, 35, 40, 45, or 50 amino acid residue deletions, insertions and/or substitutions. In some embodiments, the amino acid sequence has optionally 1, 2, 3, 4, 5, 6, 7, 8, 9, 10, 11, 12, 13, 14, 15, 16, 18, 20, 21, 22, 23, 24, or 25 amino acid residue deletions, insertions and/or substitutions. In some embodiments, the substitutions can be conservative or non-conservative substitutions. The expressed polypeptide can be assessed for the desired property, e.g., adenylate kinase activity on one or more NMPs.

### Compositions

[0610] In a further aspect, the present disclosure provides compositions of the engineered adenylate kinases disclosed herein. In some embodiments, the engineered adenylate kinase polypeptide in the composition is isolated or purified. In some embodiments, the adenylate kinase is combined with other components and compounds to provide compositions and formulations comprising the engineered adenylate kinase polypeptide as appropriate for different applications and uses.

[0611] In some embodiments, the composition comprises at least one adenylate kinase described herein. For example, a composition comprises at least one engineered adenylate kinase exemplified in Tables 7.2, 8.2, 9.2, 10.2, 11.2, 12.1, 13.2, 14.1, 15.2, 16.2, 17.2, 18.2, 19.2, 20.2, 21.2, 23.2, 24.2, 25.2, 26.2, 27.2, 28.2, 29.2, 30.2, 31.2, 32.2, 33.2, 34.2, 35.2, 36.2, 37.2, 38.2, 40.2, 41.2, 42.2, 43.2, 44.2, 45.2, 46.2, 47.2, 48.2, and 49.2, and the Sequence Listing. In some embodiments, the composition comprising an engineered adenylate kinase is an aqueous solution. In some embodiments, the composition comprising an engineered adenylate kinase is a lyophilizate.

[0612] In some embodiments, the composition further comprises at least a buffer, including the suitable buffers described herein, e.g., MOPS, triethanolamine, etc. In some embodiments, the composition further comprises an additional enzyme, including, among others, an adenosine kinase, acetate kinase, pyruvate oxidase, or 3′-O-kinase, or combinations thereof.

[0613] In some embodiments, the composition further comprises an NMP substrate. In some embodiments, the NMP substrate is a modified NMP. In some embodiments, the modified NMP substrate is modified on the 2′- and/or 3′-position of the sugar moiety (e.g., 2′-halo, 2′-O—CH₃), the nucleobase, or the phosphate group (e.g., NMP-S, NMPαS), as further described herein.

[0614] In some embodiments, the NMP substrate is an unmodified NMP. In some embodiments, the NMP substrate is AMP, GMP, CMP, UMP, or TMP. In some embodiments, the concentration of NMP in the composition is greater than that found in cells, e.g., bacterial cells or mammalian cells. In some embodiments, the concentration of NMP in the composition is at least 1 mM, 2 mM, 3 mM, 4 mM, 5 mM, 7 mM, or 10 mM, or greater. In some embodiments, the NMP substrate concentration is about 0.1 mM to 200 mM, 0.5 mM to 180 mM, 1 mM to 150 mM, 2 mM to 120 mM, 5 mM to 100 mM, 10 mM to 80 mM, or 20 mM to 60 mM, as further described herein. In some embodiments, the NMP substrate concentration is about 100 mM-200 mM. In some embodiments, the NMP substrate concentration is about 0.1 mM, 0.5 mM, 1 mM, 2 mM, 5 mM, 10 mM, 20 mM, 60 mM, 80 mM, 100 mM, 120 mM, 150 mM, 180 mM, or 200 mM.

[0615] In some embodiments, the concentration of AMP in the composition is at least 1 mM, 2 mM, 3 mM, 4 mM, 5 mM, 7 mM, or 10 mM, or greater. In some embodiments, the concentration of AMP in the composition is about 0.1 mM to 200 mM, 0.5 mM to 180 mM, 1 mM to 150 mM, 2 mM to 120 mM, 5 mM to 100 mM, 10 mM to 80 mM, or 20 mM to 60 mM. In some embodiments, the AMP substrate concentration is about 100 mM-200 mM. In some embodiments, the concentration of AMP in the composition is at least 0.1 mM, 0.5 mM, 1 mM, 2 mM, 3 mM, 4 mM, 5 mM, 7 mM, 10 mM, 20 mM, 60 mM, 80 mM, 100 mM, 120 mM, 150 mM, 180 mM, or 200 mM, or greater.

[0616] In some embodiments, the concentration of GMP in the composition is greater than 1 mM, 2 mM, 3 mM, 4 mM, 5 mM, 7 mM, or 10 mM, or greater. In some embodiments, the concentration of GMP in the composition is about 0.1 mM to 200 mM, 0.5 mM to 180 mM, 1 mM to 150 mM, 2 mM to 120 mM, 5 mM to 100 mM, 10 mM to 80 mM, or 20 mM to 60 mM. In some embodiments, the GMP substrate concentration is about 100 mM-200 mM. In some embodiments, the concentration of GMP in the composition is at least 0.1 mM, 0.5 mM, 1 mM, 2 mM, 3 mM, 4 mM, 5 mM, 7 mM, 10 mM, 20 mM, 60 mM, 80 mM, 100 mM, 120 mM, 150 mM, 180 mM, or 200 mM, or greater.

[0617] In some embodiments, the concentration of CMP in the composition is at least 0.5 mM, 1 mM, 2 mM, 3 mM, 4 mM, 5 mM, 7 mM, or 10 mM, or greater. In some embodiments, the concentration of CMP in the composition is about 0.1 mM to 200 mM, 0.5 mM to 180 mM, 1 mM to 150 mM, 2 mM to 120 mM, 5 mM to 100 mM, 10 mM to 80 mM, or 20 mM to 60 mM. In some embodiments, the CMP substrate concentration is about 100 mM-200 mM. In some embodiments, the concentration of CMP in the composition is at least 0.1 mM, 0.5 mM, 1 mM, 2 mM, 3 mM, 4 mM, 5 mM, 7 mM, 10 mM, 20 mM, 60 mM, 80 mM, 100 mM, 120 mM, 150 mM, 180 mM, or 200 mM, or greater.

[0618] In some embodiments, the concentration of UMP in the composition is at least 1 mM, 2 mM, 3 mM, 4 mM, 5 mM, 7 mM, or 10 mM or greater. In some embodiments, the concentration of UMP in the composition is about 0.1 mM to 200 mM, 0.5 mM to 180 mM, 1 mM to 150 mM, 2 mM to 120 mM, 5 mM to 100 mM, 10 mM to 80 mM, or 20 mM to 60 mM. In some embodiments, the UMP substrate concentration is about 100 mM-200 mM. In some embodiments, the concentration of UMP in the composition is at least 0.1 mM, 0.5 mM, 1 mM, 2 mM, 3 mM, 4 mM, 5 mM, 7 mM, 10 mM, 20 mM, 60 mM, 80 mM, 100 mM, 120 mM, 150 mM, 180 mM, or 200 mM, or greater.

[0619] In some embodiments, the concentration of TMP in the composition is at least 0.1 mM, 0.5 mM, 1 mM, 2 mM, 3 mM, 4 mM, 5 mM, 7 mM, or 10 mM, or greater. In some embodiments, the concentration of TMP in the composition is about 0.1 mM to 200 mM, 0.5 mM to 180 mM, 1 mM to 150 mM, 2 mM to 120 mM, 5 mM to 100 mM, 10 mM to 80 mM, or 20 mM to 60 mM. In some embodiments, the TMP substrate concentration is about 100 mM-200 mM. In some embodiments, the concentration of TMP in the composition is at least 0.1 mM, 0.5 mM, 1 mM, 2 mM, 3 mM, 4 mM, 5 mM, 7 mM, 10 mM, 20 mM, 60 mM, 80 mM, 100 mM, 120 mM, 150 mM, 180 mM, or 200 mM, or greater.

[0620] In some embodiments, the NMP substrate is a modified NMP. In some embodiments, the modified NMP substrate is modified on the 2′- and/or 3′-position of the sugar moiety (e.g., 2′-halo, 2′-O-methyl, 3′-O-phosphate, etc.), the nucleobase, the phosphate group (e.g., NMPαS), or any combinations thereof. In some embodiments, the modified NMP substrate concentration is about 0.1 mM to 200 mM, 0.5 mM to 180 mM, 1 mM to 150 mM, 2 mM to 120 mM, 5 mM to 100 mM, 10 mM to 80 mM, or 20 mM to 60 mM, as further described herein. In some embodiments, the modified NMP substrate concentration is about 100 mM-200 mM. In some embodiments, the modified NMP substrate concentration is about 0.1 mM, 0.5 mM, 1 mM, 2 mM, 5 mM, 10 mM, 20 mM, 60 mM, 80 mM, 100 mM, 120 mM, 150 mM, 180 mM, or 200 mM.

[0621] In some embodiments, the modified NMP substrate comprises a 2′-fluoro modified NMP. In some embodiments, the 2′-F modified nucleoside is 2′-F-AMP, 2′-F-GMP, 2′-F-CMP, 2′-F-2′-UMP, and/or 2-F-TMP. In some embodiments, the modified nucleoside comprises a 2′-O—CH₃ modified NMP. In some embodiments, the 2′-O—CH₃ modified nucleoside is 2′-O—CH₃ AMP, 2′-O—CH₃ GMP, 2′-O—CH₃ CMP, 2′-O—CH₃ UMP, and/or 2′-O—CH₃ TMP. Other 2′-modifications are described below.

[0622] In some embodiments, the modified NMP is modified at the 3′-position of the sugar moiety. In some embodiments, the 3′-position of the sugar moiety is modified with a blocking group, preferably a reversible blocking group. In some embodiments, the blocking group is a formate, benzoylformate, acetate, propionate, isobutyrate, aminoxy (—ONH₂), O-methyl, O-methoxymethyl, O-methylthiomethyl, O-benzyloxymethyl, O-allyl, O-(2-nitrobenzyl), O-azidomethyl (O—CH₂N₃), O-tert-butyldithiomethyl, phosphate, diphosphate, or triphosphate. Reversible 3′-blocked nucleoside/nucleotides are described in Chen et al., Genomics, Proteomics & Bioinformatics, 2013, 11(1):34-40, Metzker et al., Nucleic Acids Res., 1994, 22 (20): 4259-4267; Sabat et al., Front Chem. 2023; 11: 1161462; and patent publications U.S. Pat. Nos. 5,763,594, 9,650,406, US20200216891; WO2004/018497; and WO 2014/139596; all of which are incorporated by reference) In some embodiments, the modified sugar moiety is a 3′-O-phosphate.

[0623] In some embodiments, the modified NMP substrate comprises modified 2′- and 3′-positions of the sugar moiety, such as described herein. Exemplary modified NNP substrates with modified 2′- and 3′-positions include, among others, 2′-fluoro or 2′-O-methyl, and 3′-O-allyl, 3′-O-(2-nitrobenzyl), 3′-O-azidomethyl (O—CH₂N₃), 3′-O-tert-butyldithiomethyl, or 3′-phosphate. Other such modifications are described herein.

[0624] In some embodiments, the modified sugar moiety of the NMP substrate in the compositions is a “locked” nucleotide (e.g., locked NMP). In some embodiments, the locked NMP is a locked AMP, locked GMP, locked CMP, locked TMP, or locked UMP.

[0625] In some embodiments of the composition, the modified NMP substrate comprises a modified phosphate. In some embodiments, the modified nucleoside diphosphate comprises an alpha-thiodiphosphate (NMPαS). In some embodiments, the modified NMP substrate with a modified phosphate also has a modified sugar moiety and/or modified nucleobase.

[0626] In some embodiments, the modified NMP substrate comprises a modified nucleobase. In some embodiments, the modified nucleobases is 5-bromo-uracil, 5-iodo-uracil, 6-mCEPh-purine, 6-phenylpyrrolocytidine, N2-alkyl 8-oxoguanosine, difluorotoluene, difluorobenzene, dichlorobenzene, imidazole, or benzimidazole. Other nucleobases are described herein.

[0627] In some embodiments, the composition further comprises a phosphate donor for the adenylate kinase, for example, NTP. In some embodiments, the phosphate donor NTP has the same nucleoside structure as the NMP substrate. By way of example and not limitation, if the NMP substrate is modified at the 2′-position of the sugar moiety, the donor NTP has the same modified 2′-position of the sugar moiety. Additionally, the phosphate donor NTP has the same nucleobase as the NMP substrate.

[0628] In some embodiments, the composition comprises an engineered adenylate kinase and one or more components of a NTP regenerating system. In some embodiments, the components of the NTP regeneration system includes, among others, pyruvate kinase, creatine kinase, adenylate kinase, and/or polyphosphate kinase. In some embodiments, the components of the NTP regeneration system includes a substrate (i.e., phosphate donor) for the enzyme in the NTP regenerating system, for example, phosphoenolpyruvate, creatine phosphate, and polyphosphate, respectively.

[0629] In some embodiments, where the NTP regenerating system uses an acetate kinase, the NTP regenerating system further comprises a pyruvate oxidase, pyruvate, and phosphate, for converting the acetate to acetyl phosphate.

[0630] In some embodiments, the composition comprises an immobilized engineered adenylate kinase, as described herein. In some embodiments, the immobilized adenylate kinase is immobilized with other enzymes, e.g., an adenosine kinase, acetate kinase, and/or 3′-O-kinase.

### Uses and Methods

[0631] In another aspect, the present disclosure provides uses of the engineered adenylate kinase enzymes, either alone or in combination with other enzymes. In some embodiments, the engineered adenylate kinase is used in the production of nucleoside diphosphate (NDP) from nucleoside monophosphate (NMP). In some embodiments, a method of converting nucleoside monophosphate to nucleoside diphosphate comprises contacting a nucleoside monophosphate with an engineered adenylate kinase described herein in the presence of phosphate donor under suitable reaction conditions to convert the nucleoside monophosphate to the corresponding product nucleoside diphosphate.

[0632] In some embodiments, the nucleoside monophosphate substrate is a naturally occurring or unmodified nucleoside monophosphate. In some embodiments, unmodified nucleoside diphosphate refers to nucleosides present in naturally occurring DNA or mRNA, where the nucleosides have a 5′-phosphate.

[0633] In some embodiments, the nucleoside monophosphate has at the 2′-position of the sugar moiety a H or OH.

[0634] In some embodiments, the nucleoside monophosphate comprises a nucleobase selected from adenine, cytosine, guanine, thymine, uracil, xanthine, hypoxanthine, 2,6-diaminopurine, purine, 6,8-diaminopurine, 5-methylcytosine (m⁵C), 2-thiouridine, pseudouridine, dihydrouridine, inosine, and 7-methylguanosine (m⁷G).

[0635] In some embodiments, the unmodified nucleoside monophosphate is AMP, GMP, UMP, CMP, or TMP, and wherein the nucleoside has at the 2′-position of the sugar moiety an OH, thereby resulting in corresponding product rADP, rGDP, rUDP, rCDP, or rTDP, respectively.

[0636] In some embodiments, the unmodified nucleoside monophosphate is AMP, GMP, UMP, CMP, or TMP, and wherein the nucleoside has at the 2′-position of the sugar moiety an H, thereby by resulting in corresponding product dADP, dGDP, dUDP, dCDP, or dTDP, respectively.

[0637] In some embodiments of the method, the nucleoside monophosphate substrate is a modified nucleoside monophosphate, thereby resulting in production of the corresponding modified nucleotide diphosphate. In some embodiments, the modified nucleotide is modified in the sugar moiety, the nucleobase, or phosphate, or any combination of modified sugar moiety, nucleobase, and phosphate.

[0638] In some embodiments of the method, the modified nucleoside monophosphate comprises a modified sugar moiety. In some embodiments, the modified sugar moiety is modified at the 2′-position and/or 3′-position of the sugar moiety.

[0639] In some embodiments, the modified sugar moiety is a modified at the 2′-position of the sugar moiety. In some embodiments, the 2′-position of the sugar moiety is halo, 2′-O—R′, or 2′-O—COR′, where R′ is an alkyl, alkyloxyalkyl, cycloalkyl, heterocyclyl, aryl, heteroaryl, cycloalkylalkyl, heterocyclylalkyl, arylalkyl, or heteroarylalkyl. In some embodiments, R′ is a C₁-C₄alkyl. In some embodiments, the modified 2′-position is a 2′-O—R′, wherein in R′ is alkyloxyalkyl, alkylamine, cyanoalkyl, or —C(O)-alkyl. In some embodiments, the 2′-position of the sugar moiety of the nucleoside substrate is —O—R′, wherein R′ is —CH₃ or —CH₂CH₃ or —CH₂CH₂OCH₃. In some embodiments, the modified 2′-position is 2′-O-(2-methoxyethyl), 2′-O-allyl, 2′-O-propargyl, 2′-O-ethylamine, 2′-O-cyanoethyl, or 2′-O-acetalester.

[0640] In some embodiments, the 2′-position of the sugar moiety is halo. In some embodiments, the halo is F (2′-F) or Br (2′-Br).

[0641] In some embodiments, the modified nucleoside monophosphate substrate is a locked nucleoside. In some embodiments, the locked nucleoside is a locked C, locked GMP, locked CMP, locked TMP, or locked UMP. In some embodiments, the ribose moiety of the locked nucleoside is in the C3′-endo (beta-D) or C2′-endo (alpha-L) conformation. In some embodiments, the locked nucleoside has a methylene bridge. In some embodiments, the locked nucleoside has an ethylene bridge. Various locked nucleotides are described in, for example, WO 99/014226, WO 00/66604, WO 98/039352, WO 2004/046160, WO 00/047599, WO 2007/134181, WO 2010/077578, WO 2010/036698, WO 2007/090071, WO 2009/006478, WO 2011/156202, WO 2008/154401, WO 2009/067647, WO 2008/150729, Morita et al., Bioorganic & Med. Chem. Lett. 2002, 12, 73-76, Seth et al. J. Org. Chem. 2010, Vol 75(5) pp. 1569-81, and Mitsuoka et al., Nucleic Acids Research 2009, 37(4), 1225-1238, and Wan and Seth, J. Medical Chemistry 2016, 59, 9645-9667.

[0642] In some embodiments of the method, the modified sugar moiety is modified at the 3′-position of the sugar moiety. In some embodiments, the 3′-position of the sugar residue is modified with a blocking group, preferably a reversible blocking group. In some embodiments, the blocking group is a formate, benzoylformate, acetate, propionate, isobutyrate, aminoxy (—ONH₂), O-methyl, O-methoxymethyl, O-methylthiomethyl, O-benzyloxymethyl, O-allyl, O-(2-nitrobenzyl), O-azidomethyl (O—CH₂N₃), O-tert-butyldithiomethyl, sulfate, phosphate, diphosphate, or triphosphate. Reversible 3′-blocked nucleoside/nucleotides are described in Chen et al., Genomics, Proteomics & Bioinformatics, 2013, 11(1):34-40, Metzker et al., Nucleic Acids Res., 1994, 22 (20): 4259-4267; and patent publications U.S. Pat. Nos. 5,763,594, 9,650,406, US20200216891; WO2004/018497; and WO 2014/139596; all of which are incorporated by reference) In some embodiments, the modified sugar moiety is a 3′-O-phosphate. For example, a modified NMP substrate with a 3′-O-phosphate has the structure pNp, where the 3′-OH of the sugar moiety is modified with a phosphate.

[0643] In some embodiments, the modified NMP substrate comprises a modified nucleobase with a modification at the 2′- and the 3′-position of the sugar moiety. In some embodiments, any modification at the 2′-position of the sugar moiety is combined with any compatible modification at the 3′-position of the sugar moiety. In some embodiments, the modified NMP substrate a 2′-modification, including the 2′-modifications described herein, and a 3′-modification comprising a 3′-blocking group, particularly a 3′-reversible blocking group. In some embodiments, the 2′-modification is -2′-O-(2-methoxyethyl), 2′-O-allyl, 2′-O-propargyl, 2′-O-ethylamine, 2′-O-cyanoethyl, 2′-O-acetalester, 2′-O-methyl, 2′-O-ethyl, or 2′-fluoro, and the 3′-modification is 3′-O-methyl, 3′-O-methoxymethyl, 3′-O-methylthiomethyl, 3′-O-benzyloxymethyl, 3′-O-allyl, 3′-O-(2-nitrobenzyl), 3′-O-azidomethyl (O—CH₂N3), 3′-O-tert-butyldithiomethyl, phosphate, or triphosphate. Exemplary modified NMP substrates with a 2′- and 3′-modified sugar moiety, include among others, 2′-fluoro-AMP-3′-phosphate, 2′-fluoro-GMP-3′-phosphate, 2′-fluoro-UMP-3′-phosphate, 2′-fluoro-CMP-3′-phosphate, 2′-fluoro-TMP-3′-phosphate, 2′-O-methyl-AMP-3′-phosphate, 2′-O-methyl-GMP-3′-phosphate, 2′-O-methyl-UMP-3′-phosphate, 2′-O-methyl-CMP-3′-phosphate, and 2′-O-methyl-TMP-3′-phosphate.

[0644] In some embodiments of the method, the modified nucleoside monophosphate comprises a modified nucleobase. In some embodiments, the modified nucleobase is 5-bromo-uracil, 5-iodo-uracil, 6-mCEPh-purine, 6-phenylpyrrolocytidine, N2-alkyl 8-oxoguanosine, difluorotoluene, difluorobenzene, dichlorobenzene, imidazole, or benzimidazole.

[0645] In some embodiments, the nucleobase of the nucleoside monophosphate substrate is, among others, 5-methylcytosine, pyridin-4-one, pyridin-2-one, phenyl, pseudouracil, 3-methyl uracil, dihydrouridine, naphthyl, aminophenyl, 5-alkylcytidines, 5-alkyluridines, 5-halouridines, 6-azapyrimidines, 6-alkylpyrimidines, 5-(1-propynyl)-uridine, 5-(1-propynyl)-cytidine, quesosine, 2-thiouridine, 4-thiouridine, 4-acetyltidine, 5-(carboxyhydroxymethyl)uridine, 5-carboxymethylaminomethyl-2-thiouridine, 5-carboxymethylaminomethyluridine, -D-galactosylqueosine, 1-methyladenosine, 1-methylinosine, 2,2-dimethylguanosine, 3-methylcytidine, 2-methyladenosine, 2-methylguanosine, N6-methyladenosine, 7-methylguanosine, 5-methoxyaminomethyl-2-thiouridine, 5-methylaminomethyluridine, 5-methylcarbonylmethyluridine, 5-methyloxyuridine, 5-methyl-2-thiouridine, 2-methylthio-N6-isopentenyladenosine, -D-mannosylqueosine, uridine-5-oxyacetic acid, 2-thiocytidine, N1-methyl-adenine, N6-methyl-adenine, 8′-azido-adenine, N,N-dimethyl-adenosine, aminoallyl-adenosine, 5′-methyl-urdine, pseudouridine, N1-methyl-pseudouridine, 5′-hydroxy-methyl-uridine, 2′-thio-uridine, 4′-thio-uridine, hypoxanthine, xanthine, 5′-methyl-cytidine, 5′-hydroxy-methyl-cytidine, 6′-thio-guanine, or N7-methyl-guanine.

[0646] In some embodiments of the method, the modified nucleoside monophosphate comprises a modified phosphate. In some embodiments, the modified nucleoside monophosphate comprises a 5′-thiophosphate (NMP-S), thereby resulting in product nucleoside alpha-thiodiphosphate (NDPαS). In some embodiments, the NDPαS product is (Rp)-NDPαS, (Sp)-NDPαS, or a mixture of (Rp)-NDPαS and (Sp)-NDPαS diastereomers. In some embodiments, the method further comprises the step of separating the (Rp)-NDPαS and (Sp)-NDPαS diastereomeric products.

[0647] It is to be understood that the NMPαS can have a modified nucleoside, e.g., modification of the sugar residue at the 2′- and/or 3′-positions, a modified nucleobase, or any combinations thereof as described herein. Exemplary modified NMPαS substrates with a 2′-modified sugar moiety, include among others, 2′-fluoro-AMPαS, 2′-fluoro-GMPαS, 2′-fluoro-UMPαS, 2′-fluoro-CMPαS, 2′-fluoro-TMPαS, 2′-O-methyl-AMPαS, 2′-O-methyl-GMPαS, 2′-O-methyl-UMPαS, 2′-O-methyl-CMPαS, and 2′-O-methyl-TMPαS. Exemplary modified NMPαS substrates with a 3′-modified sugar moiety, include among others, AMPαS-3′-phosphate, GMPαS-3′-phosphate, UMPαS-3′-phosphate, CMPαS-3′-phosphate, and TMPαS-3′-phosphate. Exemplary modified NMPαS substrates with a 2′- and 3′-modified sugar moiety, include among others, 2′-fluoro-AMPαS-3′-phosphate, 2′-fluoro-GMPαS-3′-phosphate, 2′-fluoro-UMPαS-3′-phosphate, 2′-fluoro-CMPαS-3′-phosphate, 2′-fluoro-TMPαS-3′-phosphate, 2′-O-methyl-AMPαS-3′-phosphate, 2′-O-methyl-GMPαS-3′-phosphate, 2′-O-methyl-UMPαS-3′-phosphate, 2′-O-methyl-CMPαS-3′-phosphate, and 2′-O-methyl-TMPαS-3′-phosphate.

[0648] In some embodiments of the method, the phosphate donor is a nucleotide triphosphate (NTP). In some embodiments, in some embodiments, the phosphate donor NTP is rATP or dATP. In some embodiments, the phosphate donor NTP has the same nucleotide or nucleoside structure as the NMP substrate. For example, if the NMP substrate is modified at the 2′-position of the sugar moiety, the phosphate donor NTP has the same modification in the sugar moiety. Additionally, the nucleobase of the NTP donor has the same nucleobase as the NMP substrate.

[0649] In some embodiments, the phosphate donor NTP is present at a concentration of about 0.001 mM to 1 mM, 0.005 mM to 0.5 mM, 0.01 mM to 0.4 mM, 0.05 mM to 0.3 mM, or 0.1 mM to 0.2 mM. In some embodiments, the phosphate donor NTP is present at a concentration of about 0.001 mM, 0.005 mM, 0.01 mM, 0.05 mM, 0.1 mM, 0.2 mM, 0.5 mM, or 1 mM.

[0650] In some embodiments, the method further comprises a NTP regenerating or recycling system for regenerating NTP from the NDP produced by the adenylate kinase reaction. In some embodiments of the method, the NTP regenerating system comprises a creatine kinase, a pyruvate kinase, a polyphosphate kinase, and/or an acetate-kinase. In the description of enzymes herein, the database accession numbers (e.g., UniProt, GenBank, NCBI, etc.) disclosing the amino acid sequence are provided in parentheses.

[0651] In some embodiments, the NTP regenerating system is pyruvate kinase and substrate phosphoenolpyruvate. Various suitable pyruvate kinases are known in the art. In some embodiments, the pyruvate kinase for use in the NTP regenerating system is the pyruvate kinase of, among others, Escherichia coli str. K-12 substr. MG1655 (A0A3L1NNV5), Geobacillus stearothermophilus ATCC 7953 (Q02499), Schizosaccharomyces pombe (Q10208), Saccharomyces cerevisiae S288C (D6VPH8), Gallus gallus liver (F1NW43), Solanum tuberosum (P22200), Oryctolagus cuniculus M1/2 (O18919), Mus musculus muscle (P52480), Rattus norvegicus M1/2 (A0A8L2Q7B9), or Homo sapiens muscle (A0A804F729).

[0652] In some embodiments, the NTP regenerating system is creatine kinase and substrate creatine phosphate. Various suitable creatine kinases are known in the art. In some embodiments, the creatine kinase for use in the NTP regenerating system is the creatine kinase of, among others, Danio rerio (A8E5L0), Gallus gallus mitochondrial (P11009), Mus musculus (P07310), Bos taurus (Q5E9Y4), Oryctolagus cuniculus (P00563), or Homo sapiens M-type (P06732).

[0653] In some embodiments, the NTP regenerating system is polyphosphate kinase and substrate polyphosphate. Various suitable polyphosphate kinases are known in the art. In a preferred embodiment, the polyphosphate kinase is PPK1. In some embodiments, the PPK1 for use in the NTP regenerating system is the PPK1 of, among others, Pseudomonas putida DOT-TIE (AFO50238.1), Escherichia coli K-12 P0A7B1 (AAC75554.1), Clostridium acetobutylicum ATCC 824 (NP_347259.1), Thermosynechococcus elongatus (WP_011056068), Acidithiobacillus ferrooxidans (WP_064219446), Acidithiobacillus thiooxidans (WP_031572361), Bacillus acidicola (WP_066264350), Acetobacter aceti (GAN58028), Acetobacter aceti (WP_077811826.1), Thioalkalivibrio denitrificans (WP_077277945.1), or Psychromonas ingrahamii (WP_041766473.1).

[0654] In some embodiments, the NTP regenerating system is an acetate kinase and its substrate acetyl phosphate and/or propionyl phosphate. Various suitable acetates kinases are known in the art and also describe herein. In some embodiments, the acetate kinase for use in the NTP regeneration system is an acetate kinase of Escherichia coli str. K-12 substr. MG1655 (NP_416799.1), Corynebacterium jeikeium K411 (WP_011272972.1), Lactococcus cremoris subsp. cremoris KW2 (WP_011835968.1), Lactococcus lactis (WP_004254593.1), Marinitoga sp. 38H-ov (WP_165147355.1), Thermotoga sp. KOL6 (WP_101510533.1), Thermosipho melaniensis (WP_012057479.1), Thermotoga sp. RQ7 (WP_041844042.1), or Thermosipho africanus (WP_004102380.1).

[0655] In some embodiments, where the NTP regenerating system is an acetate kinase, the method further comprises a pyruvate oxidase and substrate pyruvate and inorganic phosphate. The pyruvate oxidase converts acetate to acetyl phosphate, which is then used as a phosphate donor by the acetate kinase in the NTP regenerating system. Various pyruvate oxidases are known in the art. In some embodiments, the pyruvate oxidases are homologs of pyruvate oxidases. In some embodiments, the pyruvate oxidase is a pyruvate oxidase of Bifidobacterium mongoliense (A0A087C4V4), Alkalibacterium subtropicum (A0A1I1KLE2), Pisciglobus halotolerans (A0A1I3CCM7), Jeotgalibaca sp PTS2502 (A0A1U7E9W7), Vagococcus fluvialis (A0A8I2AXT4), Candidatus Gracilibacteria bacterium (A0A2M7FGE0), Bavarilcoccus seileri (A0A3D4S346), Bifidobacterium aquikefiri (A0A261G4D1), Aerococcus urinae (F2I8Y6), or Aerococcus suis (A0A1W1YA59).

[0656] In some embodiments, the method further comprises a catalase, which converts H₂O₂ produced by the pyruvate oxidase to H₂O. Various suitable catalases are known in the art. In some embodiments, the catalase can be the catalase of Archaeoglobus fulgidus, Bacillus stearothermophilus, E. coli, Mycobacterium intracellulare, Synechococcus sp PCC7942, Arabidopsis thaliana, Pisum sativum, or Saccharomyces cerevisiae (see, e.g., Zamocky, M., Progress in Biophysics and Molecular Biology, 1999, 72(1):19-66); see also WO1992017571). In some embodiments, the catalase is a catalase of Bos taurus (P00432), Aspergillus niger (A0A254TZH3), Helicobacter pylori (JON6C6), Drosophila melanogaster (P17336) and Rattus norvegicus (P04762).

[0657] In the embodiments as provided herein and illustrated in the Examples, various ranges of suitable reaction conditions that can be used in the processes, including but not limited to, substrate loading, co-substrate loading, pH, temperature, buffer, solvent system, cofactor, polypeptide loading, and reaction time. Further suitable reaction conditions for carrying out the process for biocatalytic conversion of substrate compounds to product compounds using the enzymes described herein can be supplemented in view of the guidance provided herein to the skilled artisan, including, but not limited to, contacting the enzymes and one or more substrate compounds under experimental reaction conditions of concentration, pH, temperature, and solvent conditions, and detecting the product compound. The present disclosure contemplates any suitable reaction conditions that may find use in the methods described herein.

[0658] In some embodiments, the substrate compound in the reaction mixtures can be varied, taking into consideration, for example, the desired amount of product compound, the effect of each substrate concentration on enzyme activity, stability of enzyme under reaction conditions, and the percent conversion of each substrate to product. In some embodiments, the suitable reaction conditions comprise a substrate compound (e.g., NMP) loading of at least about 0.1 uM to 1 uM, 1 uM to 2 uM, 2 uM to 3 uM, 3 uM to 5 uM, 5 uM to 10 uM, or 10 uM to 100 uM or greater. In some embodiments, the suitable reaction conditions comprise a substrate compound (e.g., NMP) loading of about 0.1 mM to 200 mM, 0.5 mM to 180 mM, 1 mM to 150 mM, 2 mM to 120 mM, 5 mM to 100 mM, 10 mM to 80 mM, or 20 mM to 60 mM. In some embodiments, the suitable reactions conditions comprise a nucleoside substrate compound loading of about 0.1 mM, 0.5 mM, 1 mM, 2 mM, 5 mM, 10 mM, 20 mM, 60 mM, 80 mM, 100 mM, 120 mM, 150 mM, 180 mM, or 200 mM.

[0659] In some embodiments, the suitable reaction conditions comprise a substrate compound loading of at least about 0.5 to about 25 g/L, 1 to about 25 g/L, 5 to about 25 g/L, about 10 to about 25 g/L, about 20 to about 25 g/L, or about 30 to about 60 g/L. In some embodiments, the suitable reaction conditions comprise a substrate compound loading of at least about 0.5 g/L, at least about 1 g/L, at least about 5 g/L, at least about 10 g/L, at least about 15 g/L, at least about 20 g/L, at least about 30 g/L, at least about 40 g/L, at least about 50 g/L, or at least about 60 g/L, or even greater.

[0660] In carrying out the processes described herein, the enzymes may be added to the reaction mixture in the form of a purified enzyme, partially purified enzyme, whole cells transformed with gene(s) encoding the enzyme, as cell extracts and/or lysates of such cells, and/or as an enzyme immobilized on a solid support. Whole cells transformed with gene(s) encoding the enzyme(s) or cell extracts, lysates thereof, and isolated enzymes may be employed in a variety of different forms, including solid (e.g., lyophilized, spray-dried, and the like) or semisolid (e.g., a crude paste). The cell extracts or cell lysates may be partially purified by precipitation (ammonium sulfate, polyethyleneimine, heat treatment or the like, followed by a desalting procedure prior to lyophilization (e.g., ultrafiltration, dialysis, etc.). Any of the enzyme preparations (including whole cell preparations) may be stabilized by crosslinking using known crosslinking agents, such as, for example, glutaraldehyde or immobilization to a solid phase (e.g., Eupergit C, and the like).

[0661] In some embodiments, the gene(s) encoding the polypeptides can be transformed into host cell separately or together into the same host cell. For example, in some embodiments one set of host cells can be transformed with gene(s) encoding one polypeptide and another set can be transformed with gene(s) encoding another polypeptide. Both sets of transformed cells can be utilized together in the reaction mixture in the form of whole cells, or in the form of lysates or extracts derived therefrom. In other embodiments, a host cell can be transformed with gene(s) encoding multiple polypeptides. In some embodiments the polypeptides can be expressed in the form of secreted polypeptides and the culture medium containing the secreted polypeptides can be used for the synthesis reaction.

[0662] In some embodiments, the improved activity of the engineered adenylate kinase polypeptides disclosed herein provides for processes wherein higher percentage conversion can be achieved with lower concentrations of the engineered polypeptide. In some embodiments of the process, the suitable reaction conditions comprise an engineered polypeptide amount of about 0.1% w/w, 0.2% (w/w), 0.5% (w/w), 1% (w/w), 2% (w/w), 5% (w/w), 10% (w/w), 20% (w/w), 30% (w/w), 40% (w/w), 50% (w/w), 75% (w/w), 100% (w/w) or more of substrate compound loading.

[0663] In some embodiments, the engineered polypeptide is present at a molar ratio of engineered polypeptide to substrate of about 50 to 1, 25 to 1, 10 to 1, 5 to 1, 1 to 1, 1 to 5, 1 to 10, 1 to 25 or 1 to 50. In some embodiments, the engineered polypeptide is present at a molar ratio of engineered polypeptide to substrate from a range of about 50 to 1 to a range of about 1 to 50 or 1 to 100.

[0664] In some embodiments, the engineered polypeptide is present at about 0.01 g/L to about 50 g/L; about 0.01 to about 0.1 g/L; about 0.05 g/L to about 50 g/L; about 0.1 g/L to about 40 g/L; about 1 g/L to about 40 g/L; about 2 g/L to about 40 g/L; about 5 g/L to about 40 g/L; about 5 g/L to about 30 g/L; about 0.1 g/L to about 10 g/L; about 0.5 g/L to about 10 g/L; about 1 g/L to about 10 g/L; about 0.1 g/L to about 5 g/L; about 0.5 g/L to about 5 g/L; or about 0.1 g/L to about 2 g/L. In some embodiments, the adenylate kinase polypeptide is present at about 0.01 g/L, 0.05 g/L, 0.1 g/L, 0.2 g/L, 0.5 g/L, 1, 2 g/L, 5 g/L, 10 g/L, 15 g/L, 20 g/L, 25 g/L, 30 g/L, 35 g/L, 40 g/L, or 50 g/L.

[0665] In the embodiments of the process, the reaction conditions comprise a suitable pH. The desired pH or desired pH range can be maintained by use of an acid or base, an appropriate buffer, or a combination of buffering and acid or base addition. The pH of the reaction mixture can be controlled before and/or during the course of the reaction. In some embodiments, the suitable reaction conditions comprise a solution pH from about 4 to about 10, pH from about 5 to about 10, pH from about 5 to about 9, pH from about 6 to about 9, pH from about 6 to about 8. In some embodiments, the reaction conditions comprise a solution pH of about 4, 4.5, 5, 5.5, 6, 6.5, 7, 7.5, 8, 8.5, 9, 9.5, or 10.

[0666] In some embodiments, in the course of the reaction, the pH of the reaction mixture may change. The pH of the reaction mixture may be maintained at a desired pH or within a desired pH range, for example, among others, by the addition of an acid or a base, before and/or during the course of the reaction. Alternatively, the pH may be controlled by using a buffer. Accordingly, in some embodiments, the reaction condition comprises a buffer. Suitable buffers to maintain desired pH ranges are known in the art and include, by way of example and not limitation, borate, potassium phosphate, 2-(N-morpholino)ethanesulfonic acid (MES), 3-(N-morpholino)propanesulfonic acid (MOPS), acetate, triethanolamine, and 2-amino-2-hydroxymethyl-propane-1,3-diol (Tris), and the like. In some embodiments, the buffer is present in a concentration of 1 mM-500 mM, 5 mM to 450 mM, 10 mM to 400 mM, 20 mM to 350 mM, 30 mM to 300 mM, 40 mM to 200 mM, or 50 mM to 100 mM. In some embodiments, the buffer is present in the composition at about 1 mM, 5 mM, 10 mM, 20 mM, 30 mM, 40 mM, 50 mM, 100 mM, 150 mM, 200 mM, 250 mM, 300 mM, 350 mM, 400 mM, 450 mM or 500 mM. In some embodiments, the reaction conditions comprise water as a suitable solvent with no buffer present.

[0667] In the embodiments of the processes herein, a suitable temperature is used for the reaction conditions, for example, taking into consideration the increase in reaction rate at higher temperatures, and the activity of the enzyme during the reaction time period. In some embodiments, the suitable reaction conditions comprise a temperature of about 10° C. to about 95° C., about 10° C. to about 75° C., about 15° C. to about 95° C., about 20° C. to about 95° C., about 20° C. to about 65° C., about 25° C. to about 70° C., or about 50° C. to about 70° C. In some embodiments, the suitable reaction conditions comprise a temperature of about 10° C., 15° C., 20° C., 25° C., 30° C., 35° C., 40° C., 45° C., 50° C., 55° C., 60° C., 65° C., 70° C., 75° C., 80° C., 85° C., 90° C. or 95° C. In some embodiments, the temperature during the enzymatic reaction can be maintained at a specific temperature throughout the course of the reaction. In some embodiments, the temperature during the enzymatic reaction can be adjusted over a temperature profile during the course of the reaction.

[0668] In some embodiments, the processes are carried out in a solvent. Suitable solvents include water, aqueous buffer solutions, organic solvents, polymeric solvents, and/or co-solvent systems, which generally comprise aqueous solvents, organic solvents and/or polymeric solvents. The aqueous solvent (water or aqueous co-solvent system) may be pH-buffered or unbuffered. In some embodiments, the processes using the engineered adenylate kinase polypeptides can be carried out in an aqueous co-solvent system comprising an organic solvent (e.g., ethanol, isopropanol (IPA), dimethyl sulfoxide (DMSO), dimethylformamide (DMF) ethyl acetate, butyl acetate, 1-octanol, heptane, octane, methyl t butyl ether (MTBE), toluene, and the like), ionic or polar solvents (e.g., 1-ethyl 4 methylimidazolium tetrafluoroborate, 1-butyl-3-methylimidazolium tetrafluoroborate, 1-butyl 3 methylimidazolium hexafluorophosphate, glycerol, polyethylene glycol, and the like). In some embodiments, the co-solvent can be a polar solvent, such as a polyol, dimethylsulfoxide (DMSO), or lower alcohol. The non-aqueous co-solvent component of an aqueous co-solvent system may be miscible with the aqueous component, providing a single liquid phase, or may be partly miscible or immiscible with the aqueous component, providing two liquid phases. Exemplary aqueous co-solvent systems can comprise water and one or more co-solvents selected from an organic solvent, polar solvent, and polyol solvent. In general, the co-solvent component of an aqueous co-solvent system is chosen such that it does not adversely inactivate the enzymes under the reaction conditions. Appropriate co-solvent systems can be readily identified by measuring the enzymatic activity of the specified enzymes with a defined substrate of interest in the candidate solvent system, utilizing an enzyme activity assay, such as those described herein.

[0669] In some embodiments of the process, the suitable reaction conditions comprise an aqueous co-solvent, where the co-solvent comprises DMSO at about 1% to about 50% (v/v), about 1 to about 40% (v/v), about 2% to about 40% (v/v), about 5% to about 30% (v/v), about 10% to about 30% (v/v), or about 10% to about 20% (v/v). In some embodiments of the process, the suitable reaction conditions can comprise an aqueous co-solvent comprising ethanol at about 1% (v/v), about 5% (v/v), about 10% (v/v), about 15% (v/v), about 20% (v/v), about 25% (v/v), about 30% (v/v), about 35% (v/v), about 40% (v/v), about 45% (v/v), or about 50% (v/v).

[0670] In some embodiments, the reaction conditions comprise a surfactant for stabilizing or enhancing the reaction. Surfactants can comprise non-ionic, cationic, anionic and/or amphiphilic surfactants. Exemplary surfactants, include by way of example and not limitation, nonyl phenoxypolyethoxylethanol (NP40), TRITON™ X-100 polyethylene glycol tert-octylphenyl ether, polyoxyethylene-stearylamine, cetyltrimethylammonium bromide, sodium oleylamidosulfate, polyoxyethylene-sorbitanmonostearate, hexadecyldimethylamine, etc. Any surfactant that may stabilize or enhance the reaction may be employed. The concentration of the surfactant to be employed in the reaction may be generally from 0.1 to 50 mg/mL, particularly from 1 to 20 mg/mL.

[0671] In some embodiments, the reaction conditions include an antifoam agent, which aids in reducing or preventing formation of foam in the reaction solution, such as when the reaction solutions are mixed or sparged. Anti-foam agents include non-polar oils (e.g., minerals, silicones, etc.), polar oils (e.g., fatty acids, alkyl amines, alkyl amides, alkyl sulfates, etc.), and hydrophobic (e.g., treated silica, polypropylene, etc.), some of which also function as surfactants. Exemplary anti-foam agents include Y-30® (Dow Corning), poly-glycol copolymers, oxy/ethoxylated alcohols, and polydimethylsiloxanes. In some embodiments, the anti-foam can be present at about 0.001% (v/v) to about 5% (v/v), about 0.01% (v/v) to about 5% (v/v), about 0.1% (v/v) to about 5% (v/v), or about 0.1% (v/v) to about 2% (v/v). In some embodiments, the anti-foam agent can be present at about 0.001% (v/v), about 0.01% (v/v), about 0.1% (v/v), about 0.5% (v/v), about 1% (v/v), about 2% (v/v), about 3% (v/v), about 4% (v/v), or about 5% (v/v) or more as desirable to promote the reaction.

[0672] In some embodiments, the quantities of reactants used in the synthesis reaction will generally vary depending on the quantities of product desired, and concomitantly the amount of substrates employed. Those having ordinary skill in the art will readily understand how to vary these quantities to tailor them to the desired level of productivity and scale of production.

[0673] In some embodiments, the order of addition of reactants is not critical. The reactants may be added together at the same time to a solvent (e.g., monophasic solvent, biphasic aqueous co-solvent system, and the like), or alternatively, some of the reactants may be added separately, and some together at different time points. For example, where applicable, the cofactor, co-substrate and substrate may be added first to the solvent.

[0674] In some embodiments, the reaction components (e.g., enzyme, salts, etc.) may be provided to the reaction in a variety of different forms, including powder (e.g., lyophilized, spray dried, and the like), solution, emulsion, suspension, and the like. The reactants can be readily lyophilized or spray dried using methods and equipment that are known to those having ordinary skill in the art. For example, the protein solution can be frozen at −80° C. in small aliquots, then added to a pre-chilled lyophilization chamber, followed by the application of a vacuum.

[0675] For improved mixing efficiency when an aqueous co-solvent system is used, the polypeptide(s), and co-substrate may be added and mixed into the aqueous phase first. The substrate may be added and mixed in, followed by the organic phase or the substrate may be dissolved in the organic phase and mixed in. Alternatively, the substrate may be premixed in the organic phase, prior to addition to the aqueous phase.

[0676] The processes of the present invention are generally allowed to proceed until further conversion of substrate to product does not change significantly with reaction time (e.g., less than 10% of substrate being converted, or less than 5% of substrate being converted). In some embodiments, the reaction is allowed to proceed until there is complete or near complete conversion of substrate to product. Transformation of substrate to product can be monitored using known methods by detecting substrate and/or product, with or without derivatization. Suitable analytical methods include gas chromatography, HPLC, MS, and the like. In some embodiments, after suitable conversion to product, the reactants are separated from the product and additional reactants are added.

[0677] Any of the processes disclosed herein using the polypeptides for the preparation of products can be carried out under a range of suitable reaction conditions, including but not limited to ranges of substrates, temperature, pH, solvent system, substrate loading, polypeptide loading, cofactor loading, and reaction time. In one example, the suitable reaction conditions for the conversion of a NMP to a NDP comprise: (a) substrate loading of about 1-200 mM NMP; (b) about 0.01 g/L to 5 g/L engineered adenylate kinase polypeptide; (c) 1-100 mM MgCl₂; (e) 5 to 100 mM of buffer, e.g., Tris-HCl; (f) 0.01-100 mM NTP (e.g., ATP); (g) pH at 5-9; and (h) temperature of about 15° C. to 70° C. In some embodiments, additional reaction components or additional techniques carried out to supplement the reaction conditions. These can include taking measures to stabilize or prevent inactivation of the enzyme, reduce product inhibition, shift reaction equilibrium to formation of the desired product.

[0678] As described herein, the methods of using the polypeptides described herein can be carried out using the polypeptides bound or immobilized on a solid support. Methods of polypeptide immobilization are known in the art. In some embodiments, the engineered polypeptides can be bound non-covalently or covalently. Various methods for conjugation and immobilization of enzymes to solid supports (e.g., resins, membranes, beads, glass, etc.) are described in, for example, Yi et al., Proc. Biochem., 2007, 42(5):895-898; Martin et al., Appl. Microbiol. Biotechnol., 2007, 76(4): 843-851; Koszelewski et al., J. Mol. Cat. B: Enzymatic, 2010, 63: 39-44; Truppo et al., Org. Proc. Res. Dev., published online: dx.doi.org/10.1021/op200157c; Hermanson, “Bioconjugate Techniques,” 2nd Ed., Academic Press, Cambridge, MA (2008); Mateo et al., Biotechnol. Prog., 2002, 18(3):629-34; and “Bioconjugation Protocols: Strategies and Methods,” In “Methods in Molecular Biology,” Niemeyer (ed.), Humana Press, New York, NY (2004); the disclosures of each which are incorporated by reference herein). Solid supports useful for immobilizing the engineered polypeptides of the present disclosure include, but are not limited to, beads or resins comprising polymethacrylate with epoxide functional groups, polymethacrylate with amino epoxide functional groups, styrene/DVB copolymer or polymethacrylate with octadecyl functional groups. In some embodiments, exemplary solid supports useful for immobilizing the engineered polypeptides of the present invention include, but are not limited to, EnginZyme (including, EziG-1, EziG-1, and EziG-3), chitosan beads, Eupergit C, and SEPABEADs (Mitsubishi) (including EC-EP, EC-HFA/S, EXA252, EXE119 and EXE120).

[0679] In further embodiments, any of the above described processes for the conversion of one or more substrate compounds to product compound can further comprise one or more steps selected from: extraction; isolation; purification; and crystallization of product compound. Methods, techniques, and protocols for extracting, isolating, purifying, and/or crystallizing the product from biocatalytic reaction mixtures produced by the above disclosed processes are known to the ordinary artisan. Additionally, illustrative methods are provided in the Examples below.

### EXAMPLES

[0680] The following Examples, including experiments and results achieved, are provided for illustrative purposes only and are not to be construed as limiting the present invention.

[0681] In the experimental disclosure below, the following abbreviations apply where applicable: ppm (parts per million); M (molar); mM (millimolar), uM and μM (micromolar); nM (nanomolar); mol (moles); gm and g (gram); mg (milligrams); ug and μg (micrograms); L and l (liter); ml and mL (milliliter); ul, μl, mL, and μL (microliter); cm (centimeters); mm (millimeters); um and μm (micrometers); sec. (seconds); min(s) (minute(s)); h(s) and hr(s) (hour(s)); U (units); MW (molecular weight); D (daltons); rpm (rotations per minute); ° C. (degrees Celcius); LB (Luria Broth); IPTG (isopropyl-β-D-thiogalactoside); LiK (lithium-potassium); DNA (deoxyribonucleic acid); and RNA (ribonucleic acid).

### Nucleotide Modifications and Oligonucleotides

Description of modifications in oligonucleotide sequences

| Alias(es) | Description |
|---|---|
| A, dA | 2′-deoxyadenosine |
| C, dC | 2′-deoxycytidine |
| G, dG | 2′-deoxyguanosine |
| T, dT | 2′-deoxythymidine |
| rA | adenosine ribonucleotide |
| rC | cytidine ribonucleotide |
| rG | guanosine ribonucleotide |
| rU | uridine ribonucleotide |
| mA | 2′-methoxyadenosine |
| mC | 2′-methoxycytidine |
| mG | 2′-methoxyguanosine |
| mU | 2′-methoxyuridine |
| N{number}, e.g. T15 | Poly(N) of length {number} |
| * | phosphorothioate linkage |
| FAM-, /56-FAM/ | 5′-6-carboxyfluorescein |
| 5′P, /5Phos/ | 5′-phosphorate |
| 3′P, /3Phos/ | 3′-phosphorate |
| fA, /52FA/, /i2FA/, /32FA/ | 2′-fluoroadenosine |
| fG, /52FG/, /i2FG/, /32FG/ | 2′-fluoroguanosine |
| fU, /52FU/, /i2FU/, /32FU/ | 2′-fluorouridine |
| fC, /52FC/, /i2FC/, /32FC/ | 2′-fluorocytidine |

Oligonucleotide sequences are represented as DNA sequences. In this context, A, G, C and T refer to 2′-deoxyribonucleotides. In other contexts, A, G, C, and T can refer to nucleotides with modifications at the 2′ position.

| | SEQ ID | |
|---|---|---|
| Alias | NO: | Oligo sequence |
| T15AT*mG | 1321 | TTTTTTTTTTTTTTAT*mG |
| FAM-T15AT*mG | 1322 | /56-FAM/TTTTTTTTTTTTTTTAT*mG |
| T15mGmAmC | 1323 | TTTTTTTTTTTTTTmGmAmC |
| FAM-T15mGmAmC | 1324 | /56-FAM/TTTTTTTTTTTTTTTmGmAmC |
| T15AT*mGrG | 1325 | TTTTTTTTTTTTTTAT*mGrG |
| FAM-T15AT*mGrG | 1326 | /56-FAM/TTTTTTTTTTTTTTTAT*mGrG |
| T15AT*mGrA | 1327 | TTTTTTTTTTTTTTAT*mGrA |
| FAM-T15AT*mGrA | 1328 | /56-FAM/TTTTTTTTTTTTTTTAT*mGrA |
| T15mGmAmCrG | 1329 | TTTTTTTTTTTTTTmGmAmCrG |
| FAM-T15mGmAmCrG | 1330 | /56-FAM/TTTTTTTTTTTTTTTmGmAmCrG |
| T15mGmAmC/32FG/ | 1331 | TTTTTTTTTTTTTTmGmAmC/32FG/ |
| FAM-T15mGmAmC/32FG/ | 1332 | /56-FAM/TTTTTTTTTTTTTTTmGmAmC/32FG/ |
| T15mGmAmCmU | 1333 | TTTTTTTTTTTTTTmGmAmCmU |
| FAM-T15mGmAmCmU | 1334 | /56-FAM/TTTTTTTTTTTTTTTmGmAmCmU |
| T15mGmAmC | 2653 | TTTTTTTTTTTTTTTmGmAmC |
| T15mGmAmC/52FG/ | 2654 | TTTTTTTTTTTTTTTmGmAmC/52FG/ |
| FAM-T15mGmAmC/52FG/ | 2655 | /56-FAM/TTTTTTTTTTTTTTTmGmAmC/52FG/ |
| T15mGmAmCmA | 2656 | TTTTTTTTTTTTTTTmGmAmCmA |
| FAM-T15mGmAmCmA | 2657 | /56-FAM/TTTTTTTTTTTTTTTmGmAmCmA |
| T15mGmAmCmU | 2658 | TTTTTTTTTTTTTTTmGmAmCmU |
| T15mGmAmCmG | 2659 | TTTTTTTTTTTTTTTmGmAmCmG |
| FAM-T15mGmAmCmG | 2660 | /56-FAM/TTTTTTTTTTTTTTTmGmAmCmG |
| FAM-T15mGmAmC | 3193 | /56-FAM/TTTTTTTTTTTTTTTmGmAmC |
| T15mGmAmC | 3194 | TTTTTTTTTTTTTTTmGmAmC |
| FAM-T15mGmAmC/32FG/ | 3195 | /56-FAM/TTTTTTTTTTTTTTTmGmAmC/32FG/ |
| T15mGmAmC/32FG/ | 3196 | TTTTTTTTTTTTTTTmGmAmC/32FG/ |
| FAM-T15mGmAmCmU | 3197 | /56-FAM/TTTTTTTTTTTTTTTmGmAmCmU |
| T15mGmAmCmU | 3198 | TTTTTTTTTTTTTTTmGmAmCmU |
| FAM-T15mGmAmCmG | 3199 | /56-FAM/TTTTTTTTTTTTTTTmGmAmCmG |
| T15mGmAmCmG | 3200 | TTTTTTTTTTTTTTTmGmAmCmG |

### Example 1

### Gene Acquisition and Adenylate Kinase (AdyK) Selection

[0682] Synthetic genes encoding N-terminal 6-histidine tagged versions of wild-type (WT) and evolved adenylate kinase enzymes (AdK) were cloned into the pCK900 vector system (See e.g., U.S. Pat. No. 9,714,437, which is hereby incorporated by reference in its entirety) and subsequently expressed in an E. coli strain derived from W3110TKO.

[0683] Cells transformed with the adenylate kinase expression construct were grown at shake-flask scale, as described in Example 3. Cells were then lysed, purified, and dialyzed into storage buffer (20 mM Tris-HCl, pH 7.4, 100 mM KCl, 0.1 mM EDTA, and 50% glycerol). After overnight dialysis, protein samples were removed, and adenylate kinase enzyme concentrations were measured by absorption at 280 nm using a NanoDrop™ 1000 spectrophotometer. Soluble protein concentrations are summarized in Table 1.1 below.

TABLE 1.1
Soluble Enzyme Production of Variants
Relative to SEQ ID NO: 1342

| SEQ | | FIOP Soluble Enzyme |
|---|---|---|
| ID NO: | Source organism of | Production (Relative |
| (nt/aa) | AdK gene sequence | to SEQ ID NO: 1342) |
| 1335/1336 | Saccharomyces cerevisiae | +++ |
| 1337/1338 | Saccharomyces cerevisiae | +++ |
| 1/2 | Thermotoga neapolitana | ++ |
| 1339/1340 | Escherichia coli | ++ |
| 1341/1342 | Geobacillus | + |
| | stearothermophilus | |

Levels of increased soluble enzyme production were determined relative to the reference polypeptide of SEQ ID NO: 1342 and defined as follows:
“+” 1.00 to 1.10,
“++” >1.10,
“+++” >2.10

[0684] The wild-type (WT) adenylate kinase (AdyK) enzyme (SEQ ID NO: 2) encoded by the genome of Thermotoga neapolitana (UniProt ID: Q8GGL2) was selected for protein engineering. A synthetic gene (SEQ ID NO: 1) encoding an N-terminal 6-histidine tagged version of the WT AdyK was designed with codon optimization for E. coli expression, synthesized, and subcloned into the E. coli expression vector pCK100900i (See e.g., U.S. Pat. No. 7,629,157 and US Pat. Appln. Publn. 2016/0244787, all of which are hereby incorporated by reference). This plasmid construct was transformed into an E. coli strain derived from W3110. Directed evolution techniques generally known by those skilled in the art were used to generate libraries of gene variants from these plasmids. The substitutions in the enzyme variants described herein are indicated with reference to the N-terminal 6-histidine tagged version of the WT AdyK enzyme (i.e., SEQ ID NO: 2) or variants thereof, as indicated.

### Example 2

AdyK Expression and Lysate Processing for High throughput (HTP) Screening

### High Throughput (HTP) Growth of AdvK Enzyme and Variants

[0685] Transformed E. coli cells were selected by plating onto LB agar plates containing 1% glucose and 30 μg/mL chloramphenicol. After overnight incubation at 37° C., colonies were placed into the wells of 96-well shallow flat bottom NUNC™ (Thermo-Scientific) plates filled with 180 μl/well LB medium supplemented with 1% glucose and 30 μg/mL chloramphenicol. The cultures were allowed to grow overnight for 18-20 hours in a shaker (200 rpm, 30° C., and 85% relative humidity; Kuhner). Overnight growth samples (20 μL) were transferred into Costar 96-well deep plates filled with 380 μL of Terrific Broth supplemented with 30 μg/mL chloramphenicol. The plates were incubated for 120 min in a shaker (250 rpm, 30° C., and 85% relative humidity; Kuhner) until the OD₆₀₀ reached between 0.4-0.8. The cells were then induced with 40 μL of 10 mM IPTG in sterile water and incubated overnight for 18-20 hr in a shaker (250 rpm, 30° C., and 85% relative humidity; Kuhner). The cells were pelleted (4,000 rpm for 20 min), the supernatants were discarded, and the cells were frozen at −80° C. prior to analysis.

Thermal Lysis of HTP Cell Pellets with Lysozyme (Examples 13-25)

[0686] For lysis, 400 μL lysis buffer containing 50 mM triethanolamine buffer, pH 7.5, and 0.1 g/L lysozyme were added to the cell pellet in each well. The cells were shaken vigorously at room temperature for 5 min on a bench top shaker. An aliquot of the re-suspended cells (5-100 μL) was transferred to a 96-well format 200 μL BioRad PCR plate, diluting to 100 uL in lysis buffer if necessary, then briefly spun-down prior to 1 h heat treatment at the temperature indicated, typically 45-60° C. Following heat-treatment, the cell debris was pelleted by centrifugation (4,000 rpm at 4° C. for 10 min), and clear supernatants were then used in biocatalytic reactions to determine their activity levels.

### Example 3

### Shake Flask Expression and Purification of Adenylate Kinase (AdyK)

### Shake Flask Expression

[0687] Selected HTP cultures grown as described above were plated onto LB agar plates with 1% glucose and 30 μg/mL chloramphenicol and grown overnight at 37° C. A single colony from each culture was transferred to 5 mL of LB broth with 1% glucose and 30 μg/mL chloramphenicol. The cultures were grown for 20 h at 30° C., 250 rpm, and subcultured at a dilution of approximately 1:50 into 250 mL of Terrific Broth with 30 μg/mL of chloramphenicol, to a final OD₆₀₀ of about 0.05. The cultures were incubated for approximately 195 min at 30° C., 250 rpm, to an OD₆₀₀ of about 0.6, and then induced with the addition of IPTG at a final concentration of 1 mM. The induced cultures were incubated for 20 h at 30° C., 250 rpm. Following this incubation period, the cultures were centrifuged at 4,000 rpm for 10 min. The culture supernatant was discarded, and the pellets were resuspended in 35 mL of 20 mM triethanolamine, pH 7.5. This cell suspension was chilled in an ice bath and lysed using a Microfluidizer cell disruptor (Microfluidics M-110L). The crude lysate was pelleted by centrifugation (10,000 rpm for 60 min at 4° C.), and the supernatant was then filtered through a 0.2 μm PES membrane to further clarify the lysate.

Purification of AdyK from Shake Flask Lysates

[0688] AdyK lysates were supplemented with 1/50^{th} volume of SF elution buffer (50 mM Tris-HCl, 500 mM NaCl, 250 mM imidazole, 0.02% v/v Triton X-100 reagent) per well. Lysates were then purified using an AKTA Start purification system and a 5 mL HisTrap FF column (GE Healthcare). The SF wash buffer comprised 50 mM Tris-HCl, 300 mM NaCl, 20 mM imidazole, 0.02% v/v Triton X-100 reagent.

TABLE 3.1
Purification Parameters

| Parameter | Volume | |
|---|---|---|
| Column volume | 5 | mL |
| Flow rate | 8-12 | mL/min |
| Pressure limit | 0.3 | MPa |
| Sample volume | 50 | mL |
| Equilibration volume | 5 column volumes (CV) = 25 mL | |
| Wash Unbound volume | 20 CV = 100 mLs | |
| Elution | Isocratic (step) | |
| Elution volume | 5 CV = 25 mL | |
| Fraction volume | 1.5 | mL |

| | |
|---|---|
| RE-equilibration volume | 5 CV = 25 mL |

[0689] Elution fractions containing protein were identified by UV absorption (A280) and pooled, then dialyzed overnight in dialysis buffer (20 mM Tris-HCl, pH 7.4, 100 mM KCl, 0.1 mM EDTA, and 50% glycerol) in a 3.5K Slide-A-Lyzer™ dialysis cassette (Thermo Fisher) for buffer exchange. AdyK concentrations in the preparations were measured by absorption at 280 nm.

### Example 4

### Biosynthetic Cascade Reactions for Production of Nucleotide Triphosphates (NTPs)

### NTP Biosynthetic Reaction Setup

[0690] Reactions were performed in 384-well format 40 μL BioRad PCR plates. AdyK variants were assayed in the presence of adenosine kinase (AdoK/5′-O-kinase) and/or acetate kinase (AcK) variants to enable direct conversion of nucleosides to the corresponding triphosphate. The reactions were set up as follows: (i) all reaction components, except for the nucleoside substrate and the AdyK lysate, were premixed in a single solution and were aliquoted into each well of the 384-well plates, (ii) AdyK lysate solution was then added into the wells, and (iii) an aliquot of the substrate nucleoside in DMSO was added to initiate the reaction. The reaction plate was heat-sealed with a peelable aluminum seal and incubated in a thermocycler at the indicated temperature and reaction time, then held at 10° C. prior to analysis.

### Example 5

### High-Performance Liquid Chromatography (HPLC) Analysis of Phosphorylated Products

### Sample Preparation for Reaction Analysis Using HPLC

[0691] The nucleoside substrates, along with their respective 5′-monophosphate (NMP), 5′-diphosphate (NDP), and 5′-triphosphate (NTP) products produced using reactions set up as described in Example 4 were analyzed using HPLC. Mobile phases consisted of 50 mM potassium phosphate (pH 7) with 2 mM tetrabutylammonium hydrogen sulfate (Solvent A), acetonitrile (solvent B), and water (Solvent C). Products were detected by UV absorption at 254 nm. In some instances, a Zorbax RR StableBond Aq, 3.0×150 mm, 3.5 μm (Agilent, #863954-314) column was used. In other instances, a Zorbax RR StableBond Aq, 3.0×100 mm, 3.5 μm (Agilent, #861954-314) column was used, while in other instances, a Zorbax RR StableBond Aq, 2.1×50 mm, 3.5 μm (Agilent, #871700-914) column was used.

### Example 6

### Analysis of NTP Production in Biosynthetic Cascade Using Capillary Electrophoresis

### Coupling of NTP Biosynthetic Reactions to TdT for CE

[0692] For high-throughput (HTP) determination of NTP yield, NTP biosynthetic cascade reactions were terminated with either a heat killed at 95° C. for 2 min or by dilution with 75% methanol. Samples were then diluted into a coupling reaction. The reaction contained 20 mM triethanolamine (TEoA), 0.25 mM CoCl₂, 0.001 units of inorganic pyrophosphate (New England Biolabs), 4 μM SED ID NO: 1320 (TdT enzyme variant), 12.375 μM of unlabeled oligonucleotide, and 0.125 μM 5′-6-FAM-labeled oligonucleotide. Reactions were carried out at 50° C. for 60 min, followed by 2 min at 95° C.

### Sample Preparation for Reaction Analysis Using CE

[0693] For analysis of reaction samples, capillary electrophoresis was performed using either an ABI 3500XL Genetic Analyzer (ThermoFisher) or a SeqStudio™ Flex Genetic Analyzer (ThermoFisher). Reactions (1 μL) were quenched by the additions of 19 μL of 1 mM aqueous ethylenediaminetetraacetic acid (EDTA) Quenched reactions were diluted to 1.25 nM oligonucleotide, and a 2-μL aliquot of this solutions was transferred to a new 96-well MicroAmp Optical PCR plate or a 384-well MicroAmp Optical PCR plate containing 18 μL Hi-Di™ Formamide (ThermoFisher) containing the Alexa633 size standard. The ABI 3500XL and SeqStudio™ Flex were configured with POP6 polymer, 50 cm capillaries, and a 55° C. oven temperature. Pre-run settings were 18 kV for 50 sec. Injection was 10 kV for 2 sec, and the run settings were 19 kV for 620-640 sec. FAM-labeled oligo substrates and products were identified by their sizes relative to the sizing ladder.

### Example 7

### Improvements Over SEQ ID NO: 2 in Conversion of Nucleoside Monophosphates to Nucleotides

### HTP Screening for Improved AdyK Variants

[0694] Adenylate kinase of SEQ ID NO: 2 was selected as the parent adenylate kinase enzyme. Libraries of genes were produced from the parent gene using various techniques (e.g. saturation mutagenesis and recombination of previously identified beneficial mutations). The polypeptides encoded by each gene were produced in HTP and prepared as described in Table 7.1.

[0695] Reactions were performed as described in Example 4 using conditions summarized in Table 7.1. Data were collected using the HPLC assay described in Example 5.

TABLE 7.1
Reaction conditions

Lysis Buffer - TEoA (pH 7.5), 0.1 g/L lysozyme; Lysis
Conditions - 100 μL, 60° C., 60 min; Reaction buffer -
50 mM Tris, 50 mM LiK(acetyl phosphate), 10 μM ATP,
10 mM magnesium chloride, pH 8.0; Lysate concentration
(vol %) - 50; Reaction Conditions - 50 μL, 30° C., 1 hr;
Nucleoside substrate - GMP; Substrate Concentration -
10 mM; Auxiliary Cascade Enzymes (AcK) - SEQ ID NO: 1314
(10 μM); Quench - 75% methanol; Analytic dilution - XU.

[0696] Activity relative to SEQ ID NO: 2 (Activity FIOP) was calculated based on the percentage of extension products observed for the variant compared with the percentage observed with SEQ ID NO: 2 (where the percent product may be set as the average of replicates or else the highest single sample as appropriate). The results are shown in Table 7.2.

TABLE 7.2
Adenylate kinase activity relative to SEQ ID NO: 2

| SEQ | | FIOP Percent |
|---|---|---|
| ID NO: | Amino Acid Differences | Product Relative |
| (nt/aa) | (Relative to SEQ ID NO: 2) | to SEQ ID NO: 2 |
| 3/4 | Y29Q/A30S/D128K/R142L/Y186L/ | +++ |
| | T212S/I213Q | |
| 5/6 | F18L/R142L/T212S/I213Q | +++ |
| 7/8 | Y29Q/A30S/D128K/R142L/Y186L | +++ |
| 9/10 | P40C/V135P/G214P | ++ |
| 11/12 | F18L/Y29Q/A30S/F127L/I150S | ++ |
| 13/14 | V82I | ++ |
| 15/16 | K69Q | ++ |
| 17/18 | N118G | + |
| 19/20 | Y29Q/A30S | + |
| 21/22 | L206W | + |
| 23/24 | R32N | + |
| 25/26 | L16M | + |
| 27/28 | V104I | + |
| 29/30 | D111E/V135P/Q136A/G214P | + |
| 31/32 | Y29Q/D128K/D175S | + |
| 33/34 | K178N | + |
| 35/36 | F18L/D128K/R142L | + |
| 37/38 | R32N/E108M/D111E/L156N/ | + |
| | E191K | |
| 39/40 | F18L/Y29Q/D128K/V129I/R142L/ | + |
| | Y186L | |
| 41/42 | R32N/V133L | + |
| 43/44 | F18L/Y29Q/A30S/T212S/I213Q/ | + |
| | V222I | |
| 45/46 | Y29Q/E65K/F127L | + |
| 47/48 | R32N/P40C/S43G/V52H/S155F/ | + |
| | L156N/N217T | |
| 49/50 | F18L/Y29Q/D128K/V129I | + |
| 51/52 | E80N | + |
| 53/54 | R32N/S43G/L138I/N152H/E191K/ | + |
| | G214P/I215V | |
| 55/56 | R183Q | + |
| 57/58 | F18L/D175S/Y186L/T212S/I213Q | + |
| 59/60 | V129I | + |
| 61/62 | F18L/Y29Q/A30S/E65K/V129I/ | + |
| | R142L/I150S/Y186L | |
| 63/64 | F127L/R142L/T212S/I213Q | + |
| 65/66 | A30S/E65K/R142L/V222I | + |
| 67/68 | P40C/S43G/I215V | + |
| 69/70 | Q136A | + |
| 71/72 | Y29Q/I150S/G211A/T212S/I213Q/ | + |
| | E221D | |
| 73/74 | S43G/D111E/Q136A/V219W | + |
| 75/76 | I226L | + |
| 77/78 | E88N | + |
| 79/80 | S140G/I215V/D216A | + |
| 81/82 | R32N/V133L/V134L | + |
| 83/84 | F18L/Y29Q/D128K/Y186L | + |

Levels of increased activity were determined relative to the reference polypeptide of SEQ ID NO: 2 and defined as follows:
“+” 1.20 to 1.52,
“++” >1.52,
“+++” >2.23.

### Example 8

### Improvements Over SEQ ID NO: 4 in Conversion of Nucleoside Monophosphates to Nucleotides

### HTP Screening for Improved AdyK Variants

[0697] Adenylate kinase of SEQ ID NO: 4 was selected as the parent adenylate kinase enzyme. Libraries of genes were produced from the parent gene using various techniques (e.g. saturation mutagenesis and recombination of previously identified beneficial mutations). The polypeptides encoded by each gene were produced in HTP and prepared as described in Table 8.1.

[0698] Reactions were performed as described in Example 4 using conditions summarized in Table 8.1. Data were collected using the HPLC assay described in Example 5.

TABLE 8.1
Reaction conditions

Lysis Buffer - TEoA (pH 7.5), 0.1 g/L lysozyme; Lysis
Conditions - 100 μL, 60° C., 60 min; Reaction buffer -
50 mM Tris, 50 mM LiK(acetyl phosphate), 10 μM ATP,
10 mM magnesium chloride, pH 8.0; Lysate concentration
(vol %) - 50; Reaction Conditions - 1 μL, 30° C., 1 hr;
Nucleoside substrate - GMP; Substrate Concentration -
10 mM; Auxiliary Cascade Enzymes (AcK) - SEQ ID NO: 1314
(1 μM); Dilution into Coupling Reaction - 80X; Substrate
Oligonucleotides - SEQ ID NO: 1321, SEQ ID NO: 1322;
Product Oligonucleotides - SEQ ID NO: 1325, SEQ ID NO: 1326.

[0699] Activity relative to SEQ ID NO: 4 (Activity FIOP) was calculated based on the percentage of extension products observed for the variant compared with the percentage observed with SEQ ID NO: 4 (where the percent product may be set as the average of replicates or else the highest single sample as appropriate). The results are shown in Table 8.2.

TABLE 8.2
Adenylate kinase activity relative to SEQ ID NO: 4

| SEQ | | FIOP Percent |
|---|---|---|
| ID NO: | Amino Acid Differences | Product Relative |
| (nt/aa) | (Relative to SEQ ID NO: 4) | to SEQ ID NO: 4 |
| 85/86 | Y100V/P101- | +++ |
| 87/88 | G94S | +++ |
| 89/90 | E179L | +++ |
| 91/92 | D198G | +++ |
| 93/94 | D57P | ++ |
| 95/96 | V78G | ++ |
| 97/98 | E68R | ++ |
| 99/100 | K93V | ++ |
| 101/102 | L77S | ++ |
| 103/104 | K62L | ++ |
| 105/106 | A14C | ++ |
| 107/108 | I51R | ++ |
| 109/110 | N118R | ++ |
| 111/112 | C91F | ++ |
| 113/114 | L163G | ++ |
| 115/116 | E65P | ++ |
| 117/118 | Q173R | ++ |
| 119/120 | K224G | ++ |
| 121/122 | I66E | ++ |
| 123/124 | F109E | ++ |
| 125/126 | G60S | ++ |
| 127/128 | P40C/E88N | ++ |
| 129/130 | E191D | ++ |
| 131/132 | I63S | ++ |
| 133/134 | E68D/K170P | ++ |
| 135/136 | Y100S | ++ |
| 137/138 | I51M | ++ |
| 139/140 | E108S | ++ |
| 141/142 | E58G | ++ |
| 143/144 | D57H | + |
| 145/146 | E180G | + |
| 147/148 | K178R | + |
| 149/150 | Y199R | + |
| 151/152 | P40C | + |
| 153/154 | G94Q | + |
| 155/156 | E80N/K203A | + |
| 157/158 | P40C/S43G | + |
| 159/160 | I39T | + |
| 161/162 | K62S | + |
| 163/164 | P40L | + |
| 165/166 | E55Q | + |
| 167/168 | L110C | + |
| 169/170 | I51R/L59R | + |
| 171/172 | S155F/I226L | + |
| 173/174 | E80N | + |
| 175/176 | V219T | + |
| 177/178 | D166P | + |
| 179/180 | G60P | + |
| 181/182 | K202S | + |
| 183/184 | L59T | + |
| 185/186 | E80A | + |
| 187/188 | G38L | + |
| 189/190 | G94C | + |
| 191/192 | K62A | + |
| 193/194 | I51K | + |
| 195/196 | D90E | + |
| 197/198 | L59M | + |
| 199/200 | E80N/H184K/K203A | + |
| 201/202 | E35S | + |
| 203/204 | V222T | + |
| 205/206 | K178G | + |
| 207/208 | P40T | + |
| 209/210 | K54M | + |
| 211/212 | D111E/M153K/S155F | + |
| 213/214 | K62I | + |
| 215/216 | E80G | + |
| 217/218 | S112M | + |
| 219/220 | D175S | + |
| 221/222 | P74S | + |
| 223/224 | A14E | + |
| 225/226 | D57L | + |
| 227/228 | I51G | + |
| 229/230 | G94F | + |
| 231/232 | E68A | + |
| 233/234 | A105R | + |
| 235/236 | K170A | + |
| 237/238 | Q117N | + |
| 239/240 | K128S | + |
| 241/242 | P40F | + |
| 243/244 | S112C | + |
| 245/246 | G94A | + |
| 247/248 | K61A | + |
| 249/250 | E68W | + |
| 251/252 | K202G | + |
| 253/254 | E180P | + |
| 255/256 | K119R | + |
| 257/258 | I66G | + |
| 259/260 | E179G | + |
| 261/262 | S155F | + |
| 263/264 | L59V | + |
| 265/266 | N79L | + |
| 267/268 | A220E | + |
| 269/270 | I51F | + |
| 271/272 | K93A | + |
| 273/274 | I226L | + |
| 275/276 | E108M/S155F | + |
| 277/278 | E108M/D111E | + |
| 279/280 | D111E | + |
| 281/282 | K69Q/E88N | + |
| 283/284 | S43G | + |
| 285/286 | S43G/K69Q/L138I | + |
| 287/288 | P40C/S43G/E88N/V134L/K178N | + |
| 289/290 | G214P | + |
| 291/292 | E80N/V82I/H184K/V219W | + |
| 293/294 | E88N/Q136A | + |
| 295/296 | L16M/P40C/S43G/E88N | + |
| 297/298 | P40C/V134L | + |
| 299/300 | E88N | + |
| 301/302 | D111E/S155F | + |

Levels of increased activity were determined relative to the reference polypeptide of SEQ ID NO: 4 and defined as follows:
“+” 1.25 to 3.52,
“++” >3.52,
“+++” >8.02.

### Example 9

### Improvements Over SEQ ID NO: 4 in Conversion of Nucleoside Monophosphates to Nucleotides

### HTP Screening for Improved AdyK Variants

[0700] Adenylate kinase SEQ ID NO: 4 was selected as the parent adenylate kinase enzyme. Libraries of genes were produced from the parent gene using various techniques (e.g. saturation mutagenesis and recombination of previously identified beneficial mutations). The polypeptides encoded by each gene were produced in HTP and prepared as described in Table 9.1.

[0701] Reactions were performed as described in Example 4 using conditions summarized in Table 9.1. Data were collected using the HPLC assay described in Example 5.

TABLE 9.1
Reaction conditions

Lysis Buffer - TEoA (pH 7.5), 0.1 g/L lysozyme; Lysis
Conditions - 100 μL, 60° C., 60 min; Reaction buffer -
50 mM Tris, 50 mM LiK(acetyl phosphate), 10 μM ATP,
10 mM magnesium chloride, pH 8.0; Lysate concentration
(vol %) - 20; Reaction Conditions - 1 μL, 30° C., 1 hr;
Nucleoside substrate - AMP; Substrate Concentration -
10 mM; Auxiliary Cascade Enzyme (Ack) - SEQ ID NO: 1314
(1 μM); Dilution into Coupling Reaction - 200X; Substrate
Oligonucleotides - SEQ ID NO: 1321, SEQ ID NO: 1322; Product
Oligonucleotides - SEQ ID NO: 1327, SEQ ID NO: 1328.

[0702] Activity relative to SEQ ID NO: 4 (Activity FIOP) was calculated based on the percentage of extension products observed for the variant compared with the percentage observed with SEQ ID NO: 4 (where the percent product may be set as the average of replicates or else the highest single sample as appropriate). The results are shown in Table 9.2.

TABLE 9.2
Adenylate kinase activity relative to SEQ ID NO: 4

| SEQ ID | Amino Acid Differences | FIOP Percent Product |
|---|---|---|
| NO: | (Relative to | Relative to |
| (nt/aa) | SEQ ID NO: 4) | SEQ ID NO: 4 |
| 87/88 | G94S | + |
| 93/94 | D57P | + |
| 95/96 | V78G | +++ |
| 123/124 | F109E | + |
| 135/136 | Y100S | ++ |
| 139/140 | E108S | + |
| 141/142 | E58G | + |
| 145/146 | E180G | ++ |
| 147/148 | K178R | + |
| 161/162 | K62S | + |
| 165/166 | E55Q | ++ |
| 201/202 | E35S | ++ |
| 207/208 | P40T | + |
| 213/214 | K62I | + |
| 231/232 | E68A | + |
| 239/240 | K128S | +++ |
| 243/244 | S112C | + |
| 247/248 | K61A | + |
| 251/252 | K202G | +++ |
| 255/256 | K119R | + |
| 257/258 | I66G | + |
| 259/260 | E179G | + |
| 265/266 | N79L | + |
| 271/272 | K93A | ++ |
| 303/304 | L223T | +++ |
| 305/306 | P74G | +++ |
| 307/308 | E115R | +++ |
| 309/310 | I39Q | +++ |
| 311/312 | K93E | +++ |
| 313/314 | K119L | ++ |
| 315/316 | L190N | ++ |
| 317/318 | K202M | ++ |
| 319/320 | E55S | ++ |
| 321/322 | I51L | ++ |
| 323/324 | S112Q | ++ |
| 325/326 | G94T | ++ |
| 327/328 | I66A | ++ |
| 329/330 | G201A | ++ |
| 331/332 | G201K | + |
| 333/334 | G201L | + |
| 335/336 | I66R | + |
| 337/338 | K128N | + |
| 339/340 | G214L | + |
| 341/342 | L126S | + |
| 343/344 | N56E | + |
| 345/346 | E179I | + |
| 347/348 | D216S | + |
| 349/350 | E76P | + |
| 351/352 | K69Y | + |
| 353/354 | E115G | + |
| 355/356 | D166C | + |
| 357/358 | Q120L | + |
| 359/360 | S116L | + |
| 361/362 | E108V | + |
| 363/364 | K203E | + |
| 365/366 | Q194F | + |
| 367/368 | L138M | + |
| 369/370 | K178E | + |
| 371/372 | G38C | + |

Levels of increased activity were determined relative to the reference polypeptide of SEQ ID NO: 4 and defined as follows: “+” 1.05 to 1.16, “++” > 1.16, “+++” > 1.27.

### Example 10

### Improvements Over SEQ ID NO: 172 in Conversion of Nucleoside Monophosphates to Nucleotides

### HTP Screening for Improved AdyK Variants

[0703] Adenylate kinase of SEQ ID NO: 172 was selected as the parent adenylate kinase enzyme. Libraries of genes were produced from the parent gene using various techniques (e.g. saturation mutagenesis and recombination of previously identified beneficial mutations). The polypeptides encoded by each gene were produced in HTP and prepared as described in Table 10.1.

[0704] Reactions were performed as described in Example 4 using conditions summarized in Table 10.1. Data were collected using the HPLC assay described in Example 5.

TABLE 10.1
Reaction conditions

Lysis Buffer - TEoA (pH 7.5), 0.1 g/L lysozyme; Lysis Conditions - 100 μL, 60° C., 60 min;
Reaction buffer - 50 mM Tris, 50 mM LiK(acetyl phosphate), 10 μM ATP, 10 mM magnesium
chloride, pH 8.0; Lysate concentration (vol %) - 50; Reaction Conditions - 1 μL, 30° C., 1 hr;
Nucleoside substrate - GMP; Substrate Concentration - 10 mM; Auxiliary Cascade Enzymes (Ack) -
SEQ ID NO: 1314 (1 μM); Dilution into Coupling Reaction - 80X; Substrate Oligonucleotides -
SEQ ID NO: 1321, SEQ ID NO: 1322; Product Oligonucleotides - SEQ ID NO: 1325, SEQ ID NO:
1326.

[0705] Activity relative to SEQ ID NO: 172 (Activity FIOP) was calculated based on the percentage of extension products observed for the variant compared with the percentage observed with SEQ ID NO: 172 (where the percent product may be set as the average of replicates or else the highest single sample as appropriate). The results are shown in Table 10.2.

TABLE 10.2
Adenylate kinase activity relative to SEQ ID NO: 172

| SEQ ID | Amino Acid Differences | FIOP Percent Product |
|---|---|---|
| NO: | (Relative to | Relative to |
| (nt/aa) | SEQ ID NO: 172) | SEQ ID NO: 172 |
| 373/374 | I66E/V78G | +++ |
| 375/376 | V78G/E80A/K224G | +++ |
| 377/378 | V78G | +++ |
| 379/380 | E65P/I66E | +++ |
| 381/382 | V78G/K224G | ++ |
| 383/384 | V78G/E80A/F109E | ++ |
| 385/386 | P40F/G60S/G94S/L226I | ++ |
| 387/388 | I66A/E68R | ++ |
| 389/390 | I66E/E68R | ++ |
| 391/392 | V78G/E80A | ++ |
| 393/394 | G94S/Q117N/N118R/L226I | + |
| 395/396 | E68R/F109E | + |
| 397/398 | E68R | + |
| 399/400 | G94S/E179L | + |
| 401/402 | I51R/I66E/E68R/K224G | + |
| 403/404 | G94S/Q117N | + |
| 405/406 | I51R/I66E/E68R/V78G/K224G | + |
| 407/408 | I66E | + |
| 409/410 | N118R | + |
| 411/412 | K93V/G94S/E180P | + |
| 413/414 | F109E | + |
| 415/416 | E68R/K224G | + |
| 417/418 | P40F/K62L/K93V | + |
| 419/420 | K93V | + |
| 421/422 | I51R/I66E | + |
| 423/424 | G94S/Q117N/N118R | + |
| 425/426 | D198G/A220E | + |
| 427/428 | K93V/Q117N | + |
| 429/430 | Q117N/N118R | + |
| 431/432 | K93V/D198G | + |
| 433/434 | E68R/Q173R | + |
| 435/436 | P40F/Q117N | + |
| 437/438 | K224G | + |
| 439/440 | P40F/N118R/L226I | + |
| 441/442 | K93V/G94S | + |
| 443/444 | P40F/K62L/N118R | + |

Levels of increased activity were determined relative to the reference polypeptide of SEQ ID NO: 172 and defined as follows: “+” 1.54 to 2.95, “++” > 2.95, “+++” > 5.18.

### Example 11

### Improvements Over SEQ ID NO: 376 in Conversion of Nucleosides to Nucleotides

### HTP Screening for Improved AdyK Variants

[0706] Adenylate kinase of SEQ ID NO: 376 was selected as the parent adenylate kinase enzyme. Libraries of genes were produced from the parent gene using various techniques (e.g. saturation mutagenesis and recombination of previously identified beneficial mutations). The polypeptides encoded by each gene were produced in HTP and prepared as described in Table 11.1.

[0707] Reactions were performed as described in Example 4 using conditions summarized in Table 11.1. Data were collected using the HPLC assay described in Example 5.

TABLE 11.1
Reaction conditions

Lysis Buffer - TEoA (pH 7.5), 0.1 g/L lysozyme; Lysis Conditions - 100 μL, 70° C., 60 min;
Reaction buffer - 50 mM Tris, 50 mM LiK(acetyl phosphate), 10 μM ATP, 10 mM magnesium
chloride, pH 8.0; Lysate concentration (vol %) - 50; Reaction Conditions - 1 μL, 30° C., 1 hr;
Nucleoside substrate - G; Substrate Concentration - 10 mM; Auxiliary Cascade Enzymes
(AdoK/AcK) - SEQ ID NO: 1304 (10 μM), SEQ ID NO: 1316 (10 μM); Dilution into Coupling
Reaction - 80X; Substrate Oligonucleotides - SEQ ID NO: 1321, SEQ ID NO: 1322; Product
Oligonucleotides - SEQ ID NO: 1325, SEQ ID NO: 1326.

[0708] Stability relative to SEQ ID NO: 376 (Stability FIOP) was calculated based on the percentage of extension products observed for the variant compared with the percentage observed with SEQ ID NO: 376 (where the percent product may be set as the average of replicates or else the highest single sample as appropriate). The results are shown in Table 11.2.

TABLE 11.2
Adenylate kinase activity relative to SEQ ID NO: 376

| SEQ ID | Amino Acid Differences | FIOP Percent Product |
|---|---|---|
| NO: | (Relative to | Relative to |
| (nt/aa) | SEQ ID NO: 376) | SEQ ID NO: 376 |
| 445/446 | M13S | +++ |
| 447/448 | G60A | +++ |
| 449/450 | L126E | +++ |
| 451/452 | V104L | +++ |
| 453/454 | G201S | ++ |
| 455/456 | L59E | ++ |
| 457/458 | E55Q | ++ |
| 459/460 | V133E | ++ |
| 461/462 | K61P | ++ |
| 463/464 | L59M | ++ |
| 465/466 | M13G | ++ |
| 467/468 | K53A | ++ |
| 469/470 | L190A | + |
| 471/472 | D57S | + |
| 473/474 | K62A | + |
| 475/476 | T181V | + |
| 477/478 | E55G | + |
| 479/480 | K168G | + |
| 481/482 | K54R | + |
| 483/484 | K54Q | + |
| 485/486 | Q173R | + |
| 487/488 | K168Q | + |
| 489/490 | K168N | + |
| 491/492 | K170P | + |
| 493/494 | Q34V | + |
| 495/496 | L59H | + |
| 497/498 | R183L | + |
| 499/500 | Q173K | + |
| 501/502 | R183A | + |
| 503/504 | A14E | + |

Levels of increased activity were determined relative to the reference polypeptide of SEQ ID NO: 376 and defined as follows: “+” 1.11 to 2.01, “++” > 2.01, “+++” > 3.01.

### Example 12

### Improvements Over SEQ ID NO: 376 in Conversion of Nucleosides to Nucleotides

### Shake Flask Characterization of AdyK Variants

[0709] AdyK variants SEQ ID NO: 376, SEQ ID NO: 506, SEQ ID NO: 508, and SEQ ID NO: 510 were expressed and purified as described in Example 3.

[0710] To assess activity, each variant was added to a 5 μL reaction at a final concentration of 5 μM. The reaction contained 50 mM Tris (pH 8.0), 50 mM lithium potassium acetyl phosphate, 10 μM ATP, 10 mM MgCl₂, 10 μM SEQ ID NO: 1304, 10 μM SEQ ID NO: 1314, and 10 mM guanosine. Reactions were incubated in a Multitron (Infors) shaker at 30° C. & 400 rpm for 60 min. Reactions were then quenched and diluted 40-fold with 75% methanol and analyzed by HPLC as described in Example 5. Activity relative to SEQ ID NO: 376 (Activity FIOP) was calculated based on the percent product observed for variants compared to the percent product observed in the reaction with SEQ ID NO: 376 (where the percent product may be set as the average of replicates or else the highest single sample as appropriate). The results are shown in Table 12.1.

TABLE 12.1
Adenylate kinase activity relative to SEQ ID NO: 376

| SEQ ID | Amino Acid Differences | FIOP Percent Product |
|---|---|---|
| NO: | (Relative to | Relative to |
| (nt/aa) | SEQ ID NO: 376 | SEQ ID NO: 376 |
| 505/506 | G60A/K62A/A124V/K170G | ++ |
| 507/508 | G60A/K170G | + |
| 509/510 | G60A/K62A | + |

Levels of increased activity were determined relative to the reference polypeptide of SEQ ID NO: 376 and defined as follows: “+” 2.81 to 2.99, “++” > 2.99.

### Example 13

Improvements Over SEQ ID NO: 508 in conversion of Nucleosides to Nucleotides

### HTP Screening for Improved AdyK Variants

[0711] Adenylate kinase of SEQ ID NO: 508 was selected as the parent adenylate kinase enzyme. Libraries of genes were produced from the parent gene using various techniques (e.g. saturation mutagenesis and recombination of previously identified beneficial mutations). The polypeptides encoded by each gene were produced in HTP and prepared as described in Table 13.1.

[0712] Reactions were performed as described in Example 4 using conditions summarized in Table 13.1. Data were collected using the HPLC assay described in Example 5.

TABLE 13.1
Reaction conditions

Lysis Buffer - TEoA (pH 7.5), 0.1 g/L lysozyme; Lysis Conditions - 100 μL, 60° C., 60 min;
Reaction buffer - 50 mM Tris, 50 mM LiK(acetyl phosphate), 10 μM ATP, 10 mM magnesium
chloride, pH 8.0; Lysate concentration (vol %) - 50; Reaction Conditions - 1 μL, 30° C., 1 hr;
Nucleoside substrate - G; Substrate Concentration - 10 mM; Auxiliary Cascade Enzymes
(AdoK/AcK) - SEQ ID NO: 1304 (10 μM), SEQ ID NO: 1316 (10 μM); Dilution into Coupling
Reaction - 160X; Substrate Oligonucleotides - SEQ ID NO: 1321, SEQ ID NO: 1322; Product
Oligonucleotides - SEQ ID NO: 1325, SEQ ID NO: 1326.

[0713] Activity relative to SEQ ID NO: 508 (Activity FlOP) was calculated based on the percentage of extension products observed for the variant compared with the percentage observed with SEQ ID NO: 508 (where the percent product may be set as the average of replicates or else the highest single sample as appropriate). The results are shown in Table 13.2.

TABLE 13.2
Adenylate kinase activity relative to SEQ ID NO: 508

| SEQ ID | Amino Acid Differences | FIOP Percent Product |
|---|---|---|
| NO: | (Relative to | Relative to |
| (nt/aa) | SEQ ID NO: 508) | SEQ ID NO: 508 |
| 511/512 | Y15F | +++ |
| 513/514 | Y15F/E68A | +++ |
| 515/516 | Y15F/T181V | +++ |
| 517/518 | M13S/Y15F | +++ |
| 519/520 | M13S/Y15F/G201S | +++ |
| 521/522 | K54Q/E55Q | +++ |
| 523/524 | E55Q/V133E | +++ |
| 525/526 | E55Q/V133E/I197A | ++ |
| 527/528 | K54Q/E55Q/V133E/I197A | ++ |
| 529/530 | E68A | ++ |
| 531/532 | K54Q/V133E/I197A | ++ |
| 533/534 | K54Q/I197A | ++ |
| 535/536 | M13S/Y15F/E68Y | ++ |
| 537/538 | Q34V | ++ |
| 539/540 | K54Q | ++ |
| 541/542 | V133E | ++ |
| 543/544 | Q120K | + |
| 545/546 | Q34V/V133A | + |
| 547/548 | M13S/Y15F/T181V | + |
| 549/550 | E55Q | + |
| 551/552 | Y15F/L59M | + |
| 553/554 | E68A/T181V | + |
| 555/556 | G201S | + |
| 557/558 | E68Y | + |
| 559/560 | T181V | + |
| 561/562 | I66S | + |
| 563/564 | Y15F/L59M/T181V | + |
| 565/566 | I197A | + |
| 567/568 | M13S/Y15F/L59M | + |
| 569/570 | K61S | + |
| 571/572 | Q34V/K61S | + |
| 573/574 | M13S | + |
| 575/576 | K61A | + |
| 577/578 | Q34V/K69R | + |
| 579/580 | L163S | + |

Levels of increased activity were determined relative to the reference polypeptide of SEQ ID NO: 508 and defined as follows: “+” 1.06 to 1.39, “++” > 1.39, “+++” > 1.60.

### Example 14

### Improvements Over SEQ ID NO: 524 in Conversion of Nucleosides to Nucleotides

### Shake Flask Characterization of AdyK Variants

[0714] AdyK variants SEQ ID NO: 524, SEQ ID NO: 582, and SEQ ID NO: 584 were expressed and purified as described in Example 3.

[0715] To assess activity, each variant was added to a 5 μL reaction at a final concentration of 5 μM. The reaction contained 50 mM Tris (pH 8.0), 50 mM lithium potassium acetyl phosphate, 1 μM ATP, 10 mM MgCl₂, 1 μM SEQ ID NO: 1304, 1 μM SEQ ID NO: 1316, and 10 mM guanosine. Reactions were incubated in a Multitron (Infors) shaker at 30° C. & 400 rpm for 60 min. Reactions were then quenched and diluted 40-fold with 75% methanol and analyzed by HPLC as described in Example 5. Activity relative to SEQ ID NO: 524 (Activity FIOP) was calculated based on the percent product observed for variants compared to the percent product observed in the reaction with SEQ ID NO: 524 (where the percent product may be set as the average of replicates or else the highest single sample as appropriate). The results are shown in Table 14.1.

TABLE 14.1
Adenylate kinase activity relative to SEQ ID NO: 524

| SEQ ID | Amino Acid Differences | FIOP Percent Product |
|---|---|---|
| NO: | (Relative to | Relative to |
| (nt/aa) | SEQ ID NO: 524) | SEQ ID NO: 524 |
| 581/582 | Q120R | + |
| 583/584 | K61S/G201S | ++ |

Levels of increased activity were determined relative to the reference polypeptide of SEQ ID NO: 524 and defined as follows: “+” 1.48 to 1.67, “++” > 1.67.

### Example 15

### Improvements Over SEQ ID NO: 524 in Conversion of Nucleosides to Nucleotides

### HTP Screening for Improved AdyK Variants

[0716] Adenylate kinase of SEQ ID NO: 524 was selected as the parent adenylate kinase enzyme. Libraries of genes were produced from the parent gene using various techniques (e.g. saturation mutagenesis and recombination of previously identified beneficial mutations). The polypeptides encoded by each gene were produced in HTP and prepared as described in Table 15.1.

[0717] Reactions were performed as described in Example 4 using conditions summarized in Table 15.1. Data were collected using the HPLC assay described in Example 5.

TABLE 15.1
Reaction conditions

Lysis Buffer - TEoA (pH 7.5), 0.1 g/L lysozyme; Lysis Conditions - 100 μL, 60° C., 60 min;
Reaction buffer - 50 mM Tris, 50 mM LiK(acetyl phosphate), 10 μM ATP, 10 mM magnesium
chloride, pH 8.0; Lysate concentration (vol %) - 5; Reaction Conditions - 1 μL, 30° C., 1 hr;
Nucleoside substrate - G; Substrate Concentration - 10 mM; Auxiliary Cascade Enzymes
(AdoK/AcK) - SEQ ID NO: 1308 (10 μM), SEQ ID NO: 1316 (10 μM); Dilution into Coupling
Reaction - 80X; Substrate Oligonucleotides - SEQ ID NO: 1323, SEQ ID NO: 1324; Product
Oligonucleotides - SEQ ID NO: 1329, SEQ ID NO: 1330.

[0718] Activity relative to SEQ ID NO: 524 (Activity FIOP) was calculated based on the percentage of extension products observed for the variant compared with the percentage observed with SEQ ID NO: 524 (where the percent product may be set as the average of replicates or else the highest single sample as appropriate). The results are shown in Table 15.2.

TABLE 15.2
Adenylate kinase activity relative to SEQ ID NO: 524

| SEQ ID | Amino Acid Differences | FIOP Percent Product |
|---|---|---|
| NO: | (Relative to | Relative to |
| (nt/aa) | SEQ ID NO: 524) | SEQ ID NO: 524 |
| 585/586 | Q34S | +++ |
| 587/588 | K36I | +++ |
| 589/590 | K36V | ++ |
| 591/592 | K36A | ++ |
| 593/594 | K36L | + |
| 595/596 | K36M | + |
| 597/598 | A105S | + |
| 599/600 | Q34A | + |
| 601/602 | S112E | + |
| 603/604 | K31R | + |
| 605/606 | K146D | + |
| 607/608 | S112R | + |

Levels of increased activity were determined relative to the reference polypeptide of SEQ ID NO: 524 and defined as follows: “+” 1.02 to 1.15, “++” > 1.15, “+++” > 1.30.

### Example 16

### Improvements Over SEQ ID NO: 584 in Conversion of Nucleosides to Nucleotides

### HTP Screening for Improved AdyK Variants

[0719] Adenylate kinase of SEQ ID NO: 584 was selected as the parent adenylate kinase enzyme. Libraries of genes were produced from the parent gene using various techniques (e.g. saturation mutagenesis and recombination of previously identified beneficial mutations). The polypeptides encoded by each gene were produced in HTP and prepared as described in Table 16.1.

[0720] Reactions were performed as described in Example 4 using conditions summarized in Table 16.1. Data were collected using the HPLC assay described in Example 5.

TABLE 16.1
Reaction conditions

Lysis Buffer - TEoA (pH 7.5), 0.1 g/L lysozyme; Lysis Conditions - 100 μL, 60° C., 60 min; Reaction
buffer - 50 mM Tris, 50 mM LiK(acetyl phosphate), 10 μM ATP, 10 mM magnesium chloride, pH
8.0; Lysate concentration (vol %) - 2.5; Reaction Conditions - 1 μL, 30° C., 1 hr; Nucleoside substrate -
G; Substrate Concentration - 10 mM; Auxiliary Cascade Enzymes (AdoK/AcK) - SEQ ID NO: 1306
(10 μM), SEQ ID NO: 1316 (10 μM); Dilution into Coupling Reaction - 800X; Substrate
Oligonucleotides - SEQ ID NO: 1321, SEQ ID NO: 1322; Product Oligonucleotides - SEQ ID NO:
1325, SEQ ID NO: 1326.

[0721] Activity relative to SEQ ID NO: 584 (Activity FIOP) was calculated based on the percentage of extension products observed for the variant compared with the percentage observed with SEQ ID NO: 584 (where the percent product may be set as the average of replicates or else the highest single sample as appropriate). The results are shown in Table 16.2.

TABLE 16.2
Adenylate kinase activity relative to SEQ ID NO: 584

| SEQ ID | Amino Acid Differences | FIOP Percent Product |
|---|---|---|
| NO: | (Relative to | Relative to |
| (nt/aa) | SEQ ID NO: 584) | SEQ ID NO: 584 |
| 609/610 | M13G/S30G/K31R/K53A/ | +++ |
| | F109Y/K119R/K168G | |
| 611/612 | K36Y/L126E/L190A | +++ |
| 613/614 | L126E | +++ |
| 615/616 | K36Q/I39M/L126E | +++ |
| 617/618 | L126E/L190A | +++ |
| 619/620 | K36Y/I39M/L126E | +++ |
| 621/622 | K36Q/L126E | ++ |
| 623/624 | K36Y/L190A | ++ |
| 625/626 | I39M/L126E | ++ |
| 627/628 | M13G/F109Y/K119R | ++ |
| 629/630 | F109Y | ++ |
| 631/632 | K36Y/Q120G/L190A | ++ |
| 633/634 | L126E/G148T | + |
| 635/636 | L190A | + |
| 637/638 | E108R/L126E | + |
| 639/640 | S30G/K31R | + |
| 641/642 | M13G/N118A/V182I | + |
| 643/644 | K31R/K53A | + |
| 645/646 | I39M | + |
| 647/648 | K119R | + |
| 649/650 | M13G/K119R/K168G | + |
| 651/652 | K53A/K168G | + |
| 653/654 | Q34S | + |
| 655/656 | Q34S/E65A/K146D | + |
| 657/658 | K36Q/I39M | + |
| 659/660 | K119R/K168G | + |
| 661/662 | Q34S/S112R | + |
| 663/664 | K36Y/I39M | + |
| 665/666 | Q173K | + |

Levels of increased activity were determined relative to the reference polypeptide of SEQ ID NO: 584 and defined as follows: “+” 1.09 to 1.29, “++” > 1.29, “+++” > 1.46.

### Example 17

### Improvements Over SEQ ID NO: 610 in Conversion of Nucleosides to Nucleotides

### HTP Screening for Improved AdyK Variants

[0722] Adenylate kinase of SEQ ID NO: 610 was selected as the parent adenylate kinase enzyme. Libraries of genes were produced from the parent gene using various techniques (e.g. saturation mutagenesis and recombination of previously identified beneficial mutations). The polypeptides encoded by each gene were produced in HTP and prepared as described in Table 17.1.

[0723] Reactions were performed as described in Example 4 using conditions summarized in Table 17.1. Data were collected using the HPLC assay described in Example 5.

TABLE 17.1
Reaction conditions

Lysis Buffer - TEoA (pH 7.5), 0.1 g/L lysozyme; Lysis Conditions - 100 μL, 60° C., 60 min; Reaction
buffer - 50 mM Tris, 50 mM LiK(acetyl phosphate), 10 μM ATP, 10 mM magnesium chloride, pH 8.0;
Lysate concentration (vol %) - 2.5; Reaction Conditions - 1 μL, 30° C., 1 hr; Nucleoside substrate - G;
Substrate Concentration - 10 mM; Auxiliary Cascade Enzymes (AdoK/AcK) - SEQ ID NO: 1308
(10 μM), SEQ ID NO: 1318 (10 μM); Dilution into Coupling Reaction - 800X; Substrate Oligonucleotides -
SEQ ID NO: 1323, SEQ ID NO: 1324; Product Oligonucleotides - SEQ ID NO: 1329, SEQ ID NO:
1330.

[0724] Activity relative to SEQ ID NO: 610 (Activity FIOP) was calculated based on the percentage of extension products observed for the variant compared with the percentage observed with SEQ ID NO: 610 (where the percent product may be set as the average of replicates or else the highest single sample as appropriate). The results are shown in Table 17.2.

TABLE 17.2
Adenylate kinase activity relative to SEQ ID NO: 610

| SEQ ID | Amino Acid Differences | FIOP Percent Product |
|---|---|---|
| NO: | (Relative to | Relative to |
| (nt/aa) | SEQ ID NO: 610) | SEQ ID NO: 610 |
| 667/668 | L190A | +++ |
| 669/670 | E115K/L126E/L190A | ++ |
| 671/672 | L126E/L190A | ++ |
| 673/674 | Q34S/E35A/A105R | + |
| 675/676 | L126E | + |
| 677/678 | L59E/L126E | + |
| 679/680 | Q34S/A105R/S116E/K146D | + |

Levels of increased activity were determined relative to the reference polypeptide of SEQ ID NO: 610 and defined as follows: “+” 1.42 to 2.72, “++” > 2.72, “+++” > 3.83.

### Example 18

### Improvements Over SEQ ID NO: 610 in Conversion of Nucleosides to Nucleotides

### HTP Screening for Improved AdyK Variants

[0725] Adenylate kinase of SEQ ID NO: 610 was selected as the parent adenylate kinase enzyme. Libraries of genes were produced from the parent gene using various techniques (e.g. saturation mutagenesis and recombination of previously identified beneficial mutations). The polypeptides encoded by each gene were produced in HTP and prepared as described in Table 18.1.

[0726] Reactions were performed as described in Example 4 using conditions summarized in Table 18.1. Data were collected using the HPLC assay described in Example 5.

TABLE 18.1
Reaction conditions

Lysis Buffer - TEoA (pH 7.5), 0.1 g/L lysozyme; Lysis Conditions - 100 μL, 60° C., 60 min; Reaction
buffer - 50 mM Tris, 50 mM LiK(acetyl phosphate), 10 μM ATP, 10 mM magnesium chloride, pH 8.0;
Lysate concentration (vol %) - 25; Reaction Conditions - 1 μL, 30° C., 16 hr; Nucleoside substrate - fG;
Substrate Concentration - 10 mM; Auxiliary Cascade Enzymes (AdoK/AcK) - SEQ ID NO: 1310 (50
μM), SEQ ID NO: 1318 (10 μM); Dilution into Coupling Reaction - 80X; Substrate Oligonucleotides -
SEQ ID NO: 1323, SEQ ID NO: 1324; Product Oligonucleotides - SEQ ID NO: 1331, SEQ ID NO:
1332.

[0727] Activity relative to SEQ ID NO: 610 (Activity FIOP) was calculated based on the percentage of extension products observed for the variant compared with the percentage observed with SEQ ID NO: 610 (where the percent product may be set as the average of replicates or else the highest single sample as appropriate). The results are shown in Table 18.2.

TABLE 18.2
Adenylate kinase activity relative to SEQ ID NO: 610

| | | FIOP Percent |
|---|---|---|
| SEQ ID NO: | Amino Acid Differences | Product Relative to |
| (nt/aa) | (Relative to SEQ ID NO: 610) | SEQ ID NO: 610 |
| 681/682 | F48L | +++ |
| 683/684 | I66F | +++ |
| 685/686 | L59T | +++ |
| 687/688 | G148H | +++ |
| 689/690 | V82T | +++ |
| 691/692 | L59V | ++ |
| 693/694 | L59Y | ++ |
| 695/696 | L59P | ++ |
| 697/698 | Y100F | ++ |
| 699/700 | G148F | ++ |
| 701/702 | G27S | ++ |
| 703/704 | V135R | ++ |
| 705/706 | G148T | ++ |
| 707/708 | L77M | ++ |
| 709/710 | L138C | ++ |
| 711/712 | G148Q | ++ |
| 713/714 | L126A | ++ |
| 715/716 | V52A | ++ |
| 717/718 | I66Q | ++ |
| 719/720 | L59W | ++ |
| 721/722 | L59G | + |
| 723/724 | G148M | + |
| 725/726 | L59M | + |
| 727/728 | V135S | + |
| 729/730 | E68L | + |
| 731/732 | T139A | + |
| 733/734 | H184I | + |
| 735/736 | E68R | + |
| 737/738 | H184V | + |
| 739/740 | I66S | + |
| 741/742 | E68Q | + |
| 743/744 | V81I | + |
| 745/746 | E68V | + |
| 747/748 | E65F | + |
| 749/750 | M153S | + |
| 751/752 | L126V | + |
| 753/754 | E68A | + |
| 755/756 | I66T | + |
| 757/758 | D50C | + |
| 759/760 | L138V | + |
| 761/762 | T181I | + |
| 763/764 | G214T | + |
| 765/766 | T139L | + |
| 767/768 | E68T | + |
| 769/770 | G148S | + |
| 771/772 | V172H | + |
| 773/774 | L138I | + |
| 775/776 | K69L | + |
| 777/778 | V81Q | + |
| 779/780 | I154R | + |

Levels of increased activity were determined relative to the reference polypeptide of SEQ ID NO: 610 and defined as follows: “+” 1.11 to 1.52, “++” > 1.52, “+++” > 1.95.

### Example 19

### Improvements Over SEQ ID NO: 674 in Conversion of Nucleosides to Nucleotides

### HTP Screening for Improved AdyK Variants

[0728] SEQ ID NO: 674 was selected as the parent adenylate kinase enzyme. Libraries of genes were produced from the parent gene using various techniques (e.g. saturation mutagenesis and recombination of previously identified beneficial mutations). The polypeptides encoded by each gene were produced in HTP and prepared as described in Table 19.1.

[0729] Reactions were performed as described in Example 4 using conditions summarized in Table 19.1. Data were collected using the HPLC assay described in Example 5.

TABLE 19.1
Reaction conditions

Lysis Buffer - TEoA (pH 7.5), 0.1 g/L lysozyme; Lysis Conditions - 100 μL, 60° C., 60 min; Reaction
buffer - 50 mM Tris, 50 mM LiK(acetyl phosphate), 10 μM ATP, 10 mM magnesium chloride, pH
8.0; Lysate concentration (vol %) - 1; Reaction Conditions - 1 μL, 30° C., 1 hr; Nucleoside substrate -
G; Substrate Concentration - 10 mM; Auxiliary Cascade Enzymes (AdoK/AcK) - SEQ ID NO: 1310
(10 μM), SEQ ID NO: 1318 (10 μM); Dilution into Coupling Reaction - 800X; Substrate
Oligonucleotides - SEQ ID NO: 1323, SEQ ID NO: 1324; Product Oligonucleotides - SEQ ID NO:
1329, SEQ ID NO: 1330.

[0730] Activity relative to SEQ ID NO: 674 (Activity FIOP) was calculated based on the percentage of extension products observed for the variant compared with the percentage observed with SEQ ID NO: 674 (where the percent product may be set as the average of replicates or else the highest single sample as appropriate). The results are shown in Table 19.2.

TABLE 19.2
Adenylate kinase activity relative to SEQ ID NO: 674

| | | FIOP Percent |
|---|---|---|
| SEQ ID NO: | Amino Acid Differences | Product Relative to |
| (nt/aa) | (Relative to SEQ ID NO: 674) | SEQ ID NO: 674 |
| 781/782 | V81I/G148T/V219L | +++ |
| 783/784 | E68A/G148H/V219L | +++ |
| 785/786 | E68A/V81I/V219L | +++ |
| 787/788 | G148H/V219F | +++ |
| 789/790 | E68A/G148T/V219L | +++ |
| 791/792 | V81I/V219L | +++ |
| 793/794 | Q136L/L138V/T139L | ++ |
| 795/796 | G148T/V219F | ++ |
| 797/798 | G148H/V219L | ++ |
| 799/800 | E68A/V219L | ++ |
| 801/802 | I66T/E68A/V219L | ++ |
| 803/804 | I66Q/G148H/V219F | ++ |
| 805/806 | G148T/V219L | ++ |
| 807/808 | I66T/E68A/G148H | ++ |
| 809/810 | L59V | ++ |
| 811/812 | L59V/V135R | ++ |
| 813/814 | V219F | ++ |
| 815/816 | L59V/T139L | + |
| 817/818 | L138V | + |
| 819/820 | L126A/G148T/V219L | + |
| 821/822 | L59V/T181I | + |
| 823/824 | V81I | + |
| 825/826 | I66Q/V81I/V219L | + |
| 827/828 | V219L | + |
| 829/830 | L126A/V219L | + |
| 831/832 | I66Q/E68A/V81I/G148T/V219L | + |
| 833/834 | T181I | + |
| 835/836 | G27S/G148H | + |
| 837/838 | V135R/Q136L/T139R | + |
| 839/840 | Q136L/L138V/T139R | + |
| 841/842 | G148T | + |
| 843/844 | L59V/V135R/L138V/T181I | + |
| 845/846 | L59V/V135R/Q136L/L138V/T139R | + |
| 847/848 | L59V/V135R/Q136L/L138V/T181I | + |
| 849/850 | I66Q/E68G/V81I/G148H/V219L | + |
| 851/852 | G27S | + |
| 853/854 | G27S/L126A/G148T | + |
| 855/856 | V135R/Q136L/L138V | + |
| 857/858 | E68G/V81I/L126A/G148H/V219L | + |
| 859/860 | Q136L | + |
| 861/862 | G27S/L126A/G148H | + |
| 863/864 | E68G | + |
| 865/866 | L126A/G148T | + |
| 867/868 | L138V/T139R | + |

Levels of increased activity were determined relative to the reference polypeptide of SEQ ID NO: 674 and defined as follows: “+” 1.20 to 3.48, “++” > 3.48, “+++” > 5.78.

### Example 20

### Improvements Over SEQ ID NO: 816 in Conversion of Nucleosides to Nucleotides

### HTP Screening for Improved AdyK Variants

[0731] Adenylate kinase of SEQ ID NO: 816 was selected as the parent adenylate kinase enzyme. Libraries of genes were produced from the parent gene using various techniques (e.g. saturation mutagenesis and recombination of previously identified beneficial mutations). The polypeptides encoded by each gene were produced in HTP and prepared as described in Table 20.1.

[0732] Reactions were performed as described in Example 4 using conditions summarized in Table 20.1. Data were collected using the HPLC assay described in Example 5.

TABLE 20.1
Reaction conditions

Lysis Buffer - TEoA (pH 7.5), 0.1 g/L lysozyme; Lysis Conditions - 100 μL, 60° C., 60 min;
Reaction buffer - 50 mM Tris, 50 mM LiK(acetyl phosphate), 10 μM ATP, 10 mM magnesium
chloride, pH 8.0; Lysate concentration (vol %) - 25; Reaction Conditions - 1 μL, 30° C., 16 hr;
Nucleoside substrate - fG; Substrate Concentration - 10 mM; Auxiliary Cascade Enzymes
(AdoK/AcK) - SEQ ID NO: 1310 (10 μM), SEQ ID NO: 1318 (10 μM); Dilution into Coupling
Reaction - 800X; Substrate Oligonucleotides - SEQ ID NO: 1323, SEQ ID NO: 1324; Product
Oligonucleotides - SEQ ID NO: 1331, SEQ ID NO: 1332.

[0733] Activity relative to SEQ ID NO: 816 (Activity FIOP) was calculated based on the percentage of extension products observed for the variant compared with the percentage observed with SEQ ID NO: 816 (where the percent product may be set as the average of replicates or else the highest single sample as appropriate). The results are shown in Table 20.2.

TABLE 20.2
Adenylate kinase activity relative to SEQ ID NO: 816

| | | FIOP Percent |
|---|---|---|
| SEQ ID NO: | Amino Acid Differences | Product Relative to |
| (nt/aa) | (Relative to SEQ ID NO: 816) | SEQ ID NO: 816 |
| 869/870 | F48L/Y100F/G148H | +++ |
| 871/872 | F48L/I66F/G148F/V219L | +++ |
| 873/874 | F48L/Y100F | +++ |
| 875/876 | F48L/Y100F/V135R/Q136L | +++ |
| 877/878 | F48L/I66F/L77M/Y100F/V135R/ | +++ |
| | Q136L/G148H | |
| 879/880 | F48L/Y100F/Q136L | +++ |
| 881/882 | F48L/V135R/G148F | +++ |
| 883/884 | F48L/G148F | +++ |
| 885/886 | F48L/Q136L/G148F | +++ |
| 887/888 | F48L/V135R | +++ |
| 889/890 | F48L/V135R/Q136L | +++ |
| 891/892 | I66F/Y100F | +++ |
| 893/894 | F48L/I66Q/V219L | +++ |
| 895/896 | F48L/V135R/V219L | ++ |
| 897/898 | Y100F/G148H | ++ |
| 899/900 | F48L/Q136L/V219L | ++ |
| 901/902 | F48L/V219L | ++ |
| 903/904 | F48L/V135R/G148F/V219L | ++ |
| 905/906 | Y100F/V135R/Q136L | ++ |
| 907/908 | Y100F/Q136L | ++ |
| 909/910 | I66F/L77M/Y100F/Q136L/V219L | ++ |
| 911/912 | Y100F/V135R | ++ |
| 913/914 | F48L/L77M/Y100F/V135R/Q136L | ++ |
| 915/916 | Y100F | ++ |
| 917/918 | L77M/Y100F/V135R | + |
| 919/920 | F48L/I66F/Y100F/V135R/Q136L/ | + |
| | G148F/V219L | |
| 921/922 | V52A/H184I | + |
| 923/924 | I66F | + |
| 925/926 | V52A/E68L | + |
| 927/928 | Q136L/G148F | + |
| 929/930 | L126A/H184I | + |
| 931/932 | G148F | + |
| 933/934 | L126A/H184V | + |
| 935/936 | H184V | + |
| 937/938 | V52A | + |
| 939/940 | V135R/Q136L/G148F | + |
| 941/942 | L126A/L138V/H184V | + |
| 943/944 | H184I | + |
| 945/946 | G27S/H184V | + |
| 947/948 | G27S/L126A | + |
| 949/950 | G27S/L126A/G148R | + |
| 951/952 | G27S | + |
| 953/954 | G27S/L126A/H184V | + |
| 955/956 | I66Q/Y100F/V135R/V219L | + |
| 957/958 | G27S/E68A | + |
| 959/960 | V52A/E68A/V81L/L126A | + |
| 961/962 | I66Q | + |
| 963/964 | F48L/I66Q/Q136L/G148F | + |
| 965/966 | I66F/Q136L/G148H | + |
| 967/968 | I66Q/V135R | + |
| 969/970 | I66Q/Q136L | + |
| 971/972 | I66F/V135R/V219L | + |
| 973/974 | Q136L | + |
| 975/976 | V135R/G148F/V219L | + |
| 977/978 | E68A/L126A | + |
| 979/980 | I66F/G148H/V219L | + |
| 981/982 | G27S/E68L/L126A | + |
| 983/984 | G27S/E68L/H184V | + |
| 985/986 | L126A | + |
| 987/988 | E68L/V81L/L126A | + |
| 989/990 | L77M/V135R | + |
| 991/992 | V135R/Q136L | + |
| 993/994 | L77M/Q136L | + |
| 995/996 | L77M/G148F | + |
| 997/998 | V82T | + |
| 999/1000 | L138V/H184V | + |
| 1001/1002 | L77M/V135R/Q136L | + |
| 1003/1004 | G27S/L138V | + |
| 1005/1006 | V81L | + |
| 1007/1008 | V81L/L126A | + |
| 1009/1010 | G27S/L126A/L138V | + |
| 1011/1012 | E68A | + |
| 1013/1014 | V81L/L138V | + |

Levels of increased activity were determined relative to the reference polypeptide of SEQ ID NO: 816 and defined as follows: “+” 1.06 to 3.04, “++” > 3.04, “+++” > 5.27.

### Example 21

### Improvements Over SEQ ID NO: 874 in Conversion of Nucleoside Monophosphates to Nucleotides

### HTP Screening for Improved AdyK Variants

[0734] Adenylate kinase of SEQ ID NO: 874 was selected as the parent adenylate kinase enzyme. Libraries of genes were produced from the parent gene using various techniques (e.g. saturation mutagenesis and recombination of previously identified beneficial mutations). The polypeptides encoded by each gene were produced in HTP and prepared as described in Table 21.1.

[0735] Reactions were performed as described in Example 4 using conditions summarized in Table 21.1. Data were collected using the HPLC assay described in Example 5.

TABLE 21.1
Reaction conditions

Lysis Buffer - TEoA (pH 7.5), 0.1 g/L lysozyme; Lysis Conditions - 100 μL, 50° C., 60 min; Reaction
buffer - 50 mM Tris, 50 mM LiK(acetyl phosphate), 10 μM ATP, 10 mM magnesium chloride, pH
8.0; Lysate concentration (vol %) - 25; Reaction Conditions - 1 μL, 30° C., 1 hr; Nucleoside substrate -
mUMP; Substrate Concentration - 10 mM; Auxiliary Cascade Enzyme (AcK) - SEQ ID NO: 1318 (10
μM); Dilution into Coupling Reaction - 80X; Substrate Oligonucleotides - SEQ ID NO: 1323, SEQ
ID NO: 1324; Product Oligonucleotides - SEQ ID NO: 1333, SEQ ID NO: 1334.

[0736] Activity relative to SEQ ID NO: 874 (Activity FIOP) was calculated based on the percentage of extension products observed for the variant compared with the percentage observed with SEQ ID NO: 874 (where the percent product may be set as the average of replicates or else the highest single sample as appropriate). The results are shown in Table 21.2.

TABLE 21.2
Adenylate kinase activity relative to SEQ ID NO: 874

| | | FIOP Percent |
|---|---|---|
| SEQ ID NO: | Amino Acid Differences | Product Relative to |
| (nt/aa) | (Relative to SEQ ID NO: 874) | SEQ ID NO: 874 |
| 1015/1016 | R32I/A60S/V135K/D175L/1225A | +++ |
| 1017/1018 | R32I/V81L/F127I/K128N/V135K/ | +++ |
| | D175L/I225A | |
| 1019/1020 | K83S/D175F/I225A | +++ |
| 1021/1022 | V135K/D175L/1225A | +++ |
| 1023/1024 | K54T/R84H/L190R | +++ |
| 1025/1026 | Q55S/L190H/S212N | +++ |
| 1027/1028 | R32I/A60S/V81L/K83S/F127I/ | +++ |
| | K128N/V135K/I225A | |
| 1029/1030 | D175F/I225A | +++ |
| 1031/1032 | R32I/F127I/D175L | +++ |
| 1033/1034 | R84A/L190H/S212N | +++ |
| 1035/1036 | R32I/K128N/D175F | +++ |
| 1037/1038 | V81L/D175L | +++ |
| 1039/1040 | V81L/D175F | +++ |
| 1041/1042 | P21R/K54T | +++ |
| 1043/1044 | K54T/Q55S/S212N | +++ |
| 1045/1046 | R32I/D175L/1225A | +++ |
| 1047/1048 | K128N/D175F/I225A | +++ |
| 1049/1050 | K62S/R84A/L190R | +++ |
| 1051/1052 | V81L/V135M/I225A | ++ |
| 1053/1054 | P21R/K54T/K62S/L190R/S212N | ++ |
| 1055/1056 | A60S/V81L/K83G/D175L | ++ |
| 1057/1058 | Q55S/R84A/L190R | ++ |
| 1059/1060 | R32I/V81L/K83G/V135K/I225A | ++ |
| 1061/1062 | D175F | ++ |
| 1063/1064 | K62S/S212N | ++ |
| 1065/1066 | R32I/V81L/K83S | ++ |
| 1067/1068 | R32I/V81L/I225A | ++ |
| 1069/1070 | K54T/Q55S/R84A/S212N | ++ |
| 1071/1072 | Q55S/L190R | ++ |
| 1073/1074 | K62S/E179P | ++ |
| 1075/1076 | K62E/R84A/L190H | ++ |
| 1077/1078 | K54T/R84A/E179P/S212N | ++ |
| 1079/1080 | K54T/Q55S/K62S/R84A | ++ |
| 1081/1082 | V81L/V135M | ++ |
| 1083/1084 | R32I/V81L/V135K | ++ |
| 1085/1086 | E179P/L190H/S212N | ++ |
| 1087/1088 | Q55S/K62E | ++ |
| 1089/1090 | F100Y | ++ |
| 1091/1092 | P21R/K54T/K62E/L190H | ++ |
| 1093/1094 | L190H/S212N | ++ |
| 1095/1096 | K128N/D175L | ++ |
| 1097/1098 | P21R/K62S/L190H | ++ |
| 1099/1100 | K54T/E179P/L190H | ++ |
| 1101/1102 | K54T/L190R | ++ |
| 1103/1104 | P21R/Q55S/L190H | ++ |
| 1105/1106 | P21R/K54T/K62E | ++ |
| 1107/1108 | P21R/R84A | ++ |
| 1109/1110 | P21R/Q55S | ++ |
| 1111/1112 | P21R/K62S | ++ |
| 1113/1114 | P21R/E179P | ++ |
| 1115/1116 | D175L | + |
| 1117/1118 | Q55S/K62E/L190H/S212N | + |
| 1119/1120 | K54T/K62E/R84A | + |
| 1121/1122 | F127I/K128N/D175L/I225A | + |
| 1123/1124 | K54T/K62E | + |
| 1125/1126 | F100Y/V104F | + |
| 1127/1128 | Q55S/K62E/L190R/S212N | + |
| 1129/1130 | K54T/Q55S | + |
| 1131/1132 | P21R/Q55S/S212N | + |
| 1133/1134 | K62S | + |
| 1135/1136 | Q55S/R84A | + |
| 1137/1138 | Q55S/K62S/S212N | + |
| 1139/1140 | P21R/R84A/L190H | + |
| 1141/1142 | I225A | + |
| 1143/1144 | P21R/K54T/E179P/L190R | + |
| 1145/1146 | K83S/V135K | + |
| 1147/1148 | R32I/D175L | + |
| 1149/1150 | P21R/K54T/G78T/L190R | + |
| 1151/1152 | K62E | + |
| 1153/1154 | Q55S/K62E/E179P/ | + |
| | L190H/S212N | |
| 1155/1156 | V81L/V135K | + |
| 1157/1158 | P21R/K54T/L190H | + |
| 1159/1160 | P21R/Q55S/R84A/L190H | + |
| 1161/1162 | K62S/R84A | + |
| 1163/1164 | P21R/Q55S/K62E | + |
| 1165/1166 | P21R/K62S/R84A | + |
| 1167/1168 | V135M | + |
| 1169/1170 | R32I/A60S/V81L/F127I | + |
| 1171/1172 | P21R/K54T/Q55S/K62E/G78T | + |
| 1173/1174 | F100Y/V104H | + |
| 1175/1176 | K54T/R84A | + |
| 1177/1178 | Q55S/K62S/E179P/L190R | + |
| 1179/1180 | K54T/Q55S/K62S/R84A/E179P/ | + |
| | L190H/S212N | |
| 1181/1182 | L190R | + |
| 1183/1184 | L190H | + |
| 1185/1186 | K83S | + |
| 1187/1188 | F100Y/V104R | + |
| 1189/1190 | G78T | + |
| 1191/1192 | K54T/K62E/L190R | + |
| 1193/1194 | P21R/Q55S/K62E/E179P/L190H | + |
| 1195/1196 | G78C | + |
| 1197/1198 | R32I/A60S/F127I | + |
| 1199/1200 | K54T/K62E/R84A/L190H/S212N | + |
| 1201/1202 | P21R/K62S/E179P | + |
| 1203/1204 | F100Y/V104Q | + |
| 1205/1206 | F127I/K128N/I225A | + |
| 1207/1208 | R32I/I225A | + |
| 1209/1210 | R32I/A60S/V81L | + |
| 1211/1212 | I225V | + |
| 1213/1214 | V81L | + |
| 1215/1216 | K54T | + |
| 1217/1218 | P21R | + |
| 1219/1220 | A60S/V81L/K128N/D175L | + |
| 1221/1222 | L190Q | + |
| 1223/1224 | R84A | + |
| 1225/1226 | P21R/L190R/S212N | + |
| 1227/1228 | L190C | + |
| 1229/1230 | V135K | + |
| 1231/1232 | A60S/K128N/I225A | + |
| 1233/1234 | I225T | + |
| 1235/1236 | K62G | + |
| 1237/1238 | I225Q | + |
| 1239/1240 | E179P | + |
| 1241/1242 | I225R | + |
| 1243/1244 | F100Y/V104S | + |
| 1245/1246 | K83H | + |
| 1247/1248 | P21R/Q55S/K62E/L190R | + |
| 1249/1250 | F100Y/V104W | + |
| 1251/1252 | L190G | + |
| 1253/1254 | K128N | + |
| 1255/1256 | R84M | + |
| 1257/1258 | A60S | + |
| 1259/1260 | G78N | + |
| 1261/1262 | R84S | + |
| 1263/1264 | K62L | + |
| 1265/1266 | K128E | + |
| 1267/1268 | S212N | + |
| 1269/1270 | Q55S | + |
| 1271/1272 | F127I | + |
| 1273/1274 | P21S | + |
| 1275/1276 | R32I | + |
| 1277/1278 | A80G | + |
| 1279/1280 | R84E | + |
| 1281/1282 | A220V | + |
| 1283/1284 | K62S/G78T/E179P | + |
| 1285/1286 | L190E | + |
| 1287/1288 | Q55S/K62E/R84A | + |
| 1289/1290 | P21R/Q55S/L190H/S212N | + |
| 1291/1292 | R32I/F127I/K128N/I225A | + |
| 1293/1294 | P21R/K54T/Q55S/R84A/E179P | + |
| 1295/1296 | P21R/L190R | + |
| 1297/1298 | R32I/A60S/V81L/K83S/ | + |
| | K128N/V135M | |
| 1299/1300 | F127I/K128N | + |
| 1301/1302 | P21R/Q55S/E179P | + |

Levels of increased activity were determined relative to the reference polypeptide of SEQ ID NO: 874 and defined as follows: “+” 1.11 to 3.06, “++” > 3.06, “+++” > 4.97.

### Example 22

Relative activities of AdyK variants for the Conversion of Nucleosides to Nucleotides

### Shake Flask Characterization of AdyK Variants

[0737] AdyK variants SEQ ID NO: 2, SEQ ID NO: 172, SEQ ID NO: 508, SEQ ID NO: 584, SEQ ID NO: 674, SEQ ID NO: 874, and SEQ ID NO: 1032 were expressed and purified as described in Example 3.

[0738] To assess activity, each variant was added to a 5 μL reaction at a final concentration of 10 μM. The reaction contained 50 mM Tris (pH 8.0), 50 mM lithium potassium acetyl phosphate, 10 μM ATP, 10 mM MgCl₂, 10 μM AdoK variant SEQ ID NO: 1312, AcK variant 10 μM SEQ ID NO: 1318, and 10 mM nucleoside. Reactions were incubated in a Multitron (Infors) shaker at 30° C. & 400 rpm for 60 min. Reactions were then quenched and diluted 40-fold with 75% methanol and analyzed by HPLC as described in Example 5. Relative activities were normalized to the lowest observed activity by a variant on a given substrate. The results are shown in Table 22.1.

TABLE 22.1

| | Relative Activities of AdyK Variants | | | | | | | | |
|---|---|---|---|---|---|---|---|---|---|
| SEQ ID NO: | on Nucleoside Substrates | | | | | | | | |
| (nt/aa) | A | C | G | U | fA | fC | fG | fU | mA |
| 1/2 | ~ | ~ | ~ | ~ | ~ | − | ~ | − | + |
| 171/172 | ~ | ++ | ++ | +++ | ~ | ~ | + | − | + |
| 507/508 | ~ | ++ | ++ | +++ | ~ | + | ++ | + | + |
| 583/584 | ~ | ++ | ++ | +++ | ~ | + | ++ | ~ | + |
| 673/674 | ~ | ++ | ++ | +++ | ~ | + | ++ | + | + |
| 873/874 | ~ | ++ | ++ | +++ | ~ | + | +++ | + | + |
| 1031/1032 | ~ | ++ | ++ | +++ | ~ | + | +++ | + | ~ |

Levels of relative activity were measured for the listed variants and defined as follows: “−” 0.00 to 0.99, “~” ≥ 1.0, “+” > 1.10, “++” > 4.15, “+++” > 100.

### Example 23

### Improvements Over SEQ ID NO: 1032 in Conversion of Nucleoside Monophosphates to Nucleotides

### HTP Screening for Improved AdyK Variants

[0739] Adenylate kinase of SEQ ID NO: 1032 was selected as the parent adenylate kinase enzyme. Libraries of genes were produced from the parent gene using various techniques (e.g. saturation mutagenesis and recombination of previously identified beneficial mutations). The polypeptides encoded by each gene were produced in HTP and prepared as described in Table 23.1.

[0740] Reactions were performed as described in Example 4 using conditions summarized in Table 23.1. Data were collected using the TdT-coupled reaction and CE assay described in Example 6.

TABLE 23.1
Reaction conditions

Lysis Buffer - TEoA (pH 7.5), 0.1 g/L lysozyme; Lysis Conditions - 100 μL, 50° C., 60 min; Reaction
buffer - 50 mM Tris, 50 mM LiK(acetylphosphate), 10 μM ATP, 10 mM magnesium chloride, pH 8.0;
Lysate concentration (vol %) - 25; Reaction Conditions - 1 μL, 30° C., 1 hr; Nucleoside substrate -
mUMP; Substrate Concentration - 10 mM; Auxiliary Cascade Enzymes (Ack) - SEQ ID NO: 1318
(10 μM); Dilution into Coupling Reaction - 800X; Substrate Oligonucleotides - SEQ ID NO: 1323,
SEQ ID NO: 1324; Product Oligonucleotides - SEQ ID NO: 1333, SEQ ID NO: 1334.

[0741] Activity relative to SEQ ID NO: 1032 (Activity FIOP) was calculated based on the percentage of extension products observed for the variant compared with the percentage observed with SEQ ID NO: 1032 (where the percent product may be set as the average of replicates or else the highest single sample as appropriate). The results are shown in Table 23.2.

TABLE 23.2
Adenylate kinase activity relative to SEQ ID NO: 1032

| | | FIOP activity - | FIOP activity - |
|---|---|---|---|
| SEQ ID NO: | Amino Acid Differences | mUMP relative to | mGMP relative to |
| (nt/aa) | (Relative to SEQ ID NO: 1032) | SEQ ID NO: 1032 | SEQ ID NO: 1032 |
| 1355/1356 | K54T/A80D/I225A | ++ | +++ |
| 1357/1358 | Q55S/A80D/E180H | + | +++ |
| 1359/1360 | K54T/Q55S/A80D/R208E/I225L | | +++ |
| 1361/1362 | R84M/K128E/F155T/L190R/S212N | +++ | +++ |
| 1363/1364 | K62S/F155T/L190H | +++ | +++ |
| 1365/1366 | K83T/R84M/F155T/L190H | ++ | +++ |
| 1367/1368 | K62S/K128E/V135K/L190H | ++ | +++ |
| 1369/1370 | I225A | + | ++ |
| 1371/1372 | R84M/F155T/L190R | +++ | ++ |
| 1373/1374 | K128E/L190R | ++ | ++ |
| 1375/1376 | L190R/S212N | ++ | ++ |
| 1377/1378 | K83T/R84M/F155T | + | ++ |
| 1379/1380 | K54T/R208E/I225A | + | ++ |
| 1381/1382 | R84M/F155T/L190H | ++ | ++ |
| 1383/1384 | R84H/S212N | + | ++ |
| 1385/1386 | R84M/A123S/F155T/S212N | ++ | ++ |
| 1387/1388 | K62S/K128E/L190R | +++ | ++ |
| 1389/1390 | Q55S/A80D/R208E/I225A | | ++ |
| 1391/1392 | F155T/L190R | +++ | ++ |
| 1393/1394 | K83T/R84M/L190R/S212N | + | ++ |
| 1395/1396 | K83T/K128E/F155T/L190H/S212N | + | ++ |
| 1397/1398 | Q55S/E180H/I225A | + | ++ |
| 1399/1400 | R84M/L190R/S212N | ++ | ++ |
| 1401/1402 | K54T/A80D/E180H/R208E/I225A | | ++ |
| 1403/1404 | A80D/R208E | | ++ |
| 1405/1406 | V135K/F155T/L190R | + | ++ |
| 1407/1408 | S212N | + | ++ |
| 1409/1410 | A80D/E180H/R208E | | ++ |
| 1411/1412 | K128E/V135K/L190R/S212N | + | ++ |
| 1413/1414 | K128E/F155T/S212N | + | ++ |
| 1415/1416 | A80D/R208E/I225L | | ++ |
| 1417/1418 | K83T/S212N | | ++ |
| 1419/1420 | K62S/R84M/F155T/L190R | +++ | + |
| 1421/1422 | K54T/E179V/I225A | ++ | + |
| 1423/1424 | R84H | + | + |
| 1425/1426 | K83T/R84M/L190R | ++ | + |
| 1427/1428 | K128E/S212N | + | + |
| 1429/1430 | K54T/Q55S/A80D/R208E | | + |
| 1431/1432 | L190H/S212N | + | + |
| 1433/1434 | Q55S | + | + |
| 1435/1436 | K62S/K128E | ++ | + |
| 1437/1438 | K54T/A80D/R208E/I225A | | + |
| 1439/1440 | K62S/K83T/R84M/L190R | + | + |
| 1441/1442 | E179A/I225A | + | + |
| 1443/1444 | L190R | ++ | + |
| 1445/1446 | A80D/V169D/R208E | | + |
| 1447/1448 | K62S/K128E/S212N | ++ | + |
| 1449/1450 | A80D | | + |
| 1451/1452 | K62S | ++ | + |
| 1453/1454 | K54T/Q55S/A80D/I225L | | + |
| 1455/1456 | K54T/A80D/E180H/R208E | | + |
| 1457/1458 | K83T/R84M/K128E/L190H/S212N | + | + |
| 1459/1460 | K62S/K83T/L190R | +++ | + |
| 1461/1462 | E179V/I225A | ++ | + |
| 1463/1464 | K62S/L190R | +++ | + |
| 1465/1466 | A80D/E179V | | + |
| 1467/1468 | A80D/E180H | | + |
| 1469/1470 | K54T/A80D | | + |
| 1471/1472 | K62S/K83T/R84H/K128E/L190H/S212N | + | + |
| 1473/1474 | K83T/R84M/V135K/S212N | | + |
| 1475/1476 | K54T/A80D/E179A/R208E | | + |
| 1477/1478 | K62S/R84H/K128E | ++ | + |
| 1479/1480 | G11D/K62S/R84M/K128E/L190H/S212N | + | + |
| 1481/1482 | A80D/E179V/R208E | | + |
| 1483/1484 | A80D/I225A | | + |
| 1485/1486 | K62S/R84M/K128E/L190H/S212N | + | + |
| 1487/1488 | K62S/R84H/S212N | ++ | + |
| 1489/1490 | A80D/E179V/E180H/R208E/I225L | | + |
| 1491/1492 | K62S/V135K | ++ | + |
| 1493/1494 | Q55S/R208E | + | + |
| 1495/1496 | K62S/R84H | ++ | + |
| 1497/1498 | K128E/V135K/L190H | + | + |
| 1499/1500 | Q55S/R208E/I225A | + | + |
| 1501/1502 | L190H | + | + |
| 1503/1504 | R84H/K128E/L190H | + | + |
| 1505/1506 | K62S/R84H/K128E/L190R | +++ | + |
| 1507/1508 | K62S/V135K/S212N | + | + |
| 1509/1510 | K54T/E179V/E180H/I225A | + | + |
| 1511/1512 | K128E/L190H | + | + |
| 1513/1514 | K62S/R84M/V135K/S212N | + | + |
| 1515/1516 | V135K | + | + |
| 1517/1518 | K54T/Q55S/I225L | + | + |
| 1519/1520 | Q55S/A80D/E179V/E180H | + | + |
| 1521/1522 | K62S/R84M/S212N | + | + |
| 1523/1524 | R84M/V135K/L190R | + | + |
| 1525/1526 | R84M/K128E | + | |
| 1527/1528 | K54T | + | |
| 1529/1530 | R84M/K128E/V135K | + | |
| 1531/1532 | K54T/E179A/R208E/I225A | + | |
| 1533/1534 | Q55S/E179V/I225L | + | |
| 1535/1536 | K128E | + | |
| 1537/1538 | K62S/K83T/R84M/F155T/L190R | ++ | |
| 1539/1540 | R84M/V135K | + | |
| 1541/1542 | R84H/K128E/F155T | + | |
| 1543/1544 | Q55S/E179V/E180H | + | |
| 1545/1546 | K83T/R84M/K128E/L190R | + | |
| 1547/1548 | K83T/R84M/L190H | + | |
| 1549/1550 | R84M | + | |
| 1551/1552 | K54T/Q55S/E179V/I225A | + | |

Levels of increased activity were determined for FIOP activity - mUMP relative to SEQ ID NO: 1032 and are defined as follows: “+” > 1.1, “++” > 1.6, “+++” > 2.0. Levels of increased activity were determined for FIOP activity - mGMP relative to SEQ ID NO: 1032 and are defined as follows: “+” > 1.1, “++” > 1.65, “+++” > 2.4.

### Example 24

### Improvements Over SEQ ID NO: 1388 in Conversion of Nucleoside Monophosphates to Nucleotides

### HTP Screening for Improved AdyK Variants

[0742] Adenylate kinase of SEQ ID NO: 1388 was selected as the parent adenylate kinase enzyme. Libraries of genes were produced from the parent gene using various techniques (e.g. saturation mutagenesis and recombination of previously identified beneficial mutations). The polypeptides encoded by each gene were produced in HTP and prepared as described in Table 24.1.

[0743] Reactions were performed as described in Example 4 using conditions summarized in Table 24.1. Data were collected using the TdT-coupled reaction and CE assay described in Example 6.

TABLE 24.1
Reaction conditions

Lysis Buffer - TEoA (pH 7.5), 0.1 g/L lysozyme; Lysis Conditions - 100 μL, 50° C., 60 min; Reaction
buffer - 50 mM Tris, 50 mM LiK(acetylphosphate), 10 μM ATP, 10 mM magnesium chloride, pH 8.0;
Lysate concentration (vol %) - 5; Reaction Conditions - 1 μL, 30° C., 1 hr; Nucleoside substrate - fG;
Substrate Concentration - 10 mM; Auxiliary Cascade Enzymes (AdoK/AcK) - SEQ ID NO: 1338 (10
μM), SEQ ID NO: 1318 (10 μM); Dilution into Coupling Reaction - 800X; Substrate
Oligonucleotides - SEQ ID NO: 1323, SEQ ID NO: 1324; Product Oligonucleotides - SEQ ID NO:
2654, SEQ ID NO: 2655.

[0744] Activity relative to SEQ ID NO: 1388 (Activity FIOP) was calculated based on the percentage of extension products observed for the variant compared with the percentage observed with SEQ ID NO: 1388 (where the percent product may be set as the average of replicates or else the highest single sample as appropriate). The results are shown in Table 24.2.

TABLE 24.2
Adenylate kinase activity relative to SEQ ID NO: 1388

| | | FIOP activity - |
|---|---|---|
| SEQ ID NO: | Amino Acid Differences | fG relative to |
| (nt/aa) | (Relative to SEQ ID NO: 1388) | SEQ ID NO: 1388 |
| 1553/1554 | I143S | +++ |
| 1555/1556 | W228G | +++ |
| 1557/1558 | Q136A | +++ |
| 1559/1560 | I143T | +++ |
| 1561/1562 | V82Q | +++ |
| 1563/1564 | I143A | +++ |
| 1565/1566 | L156C | +++ |
| 1567/1568 | I205P | +++ |
| 1569/1570 | V82P | ++ |
| 1571/1572 | L226P | ++ |
| 1573/1574 | W228L | ++ |
| 1575/1576 | I143C | ++ |
| 1577/1578 | I150G | ++ |
| 1579/1580 | I150S | ++ |
| 1581/1582 | V219P | ++ |
| 1583/1584 | I150P | ++ |
| 1585/1586 | N217H | ++ |
| 1587/1588 | L226T | ++ |
| 1589/1590 | I143G | ++ |
| 1591/1592 | V218L | ++ |
| 1593/1594 | E68S | ++ |
| 1595/1596 | L142R | ++ |
| 1597/1598 | S212I | ++ |
| 1599/1600 | S212L | ++ |
| 1601/1602 | W228P | ++ |
| 1603/1604 | Q213S | ++ |
| 1605/1606 | L226S | ++ |
| 1607/1608 | L156T | + |
| 1609/1610 | N79P | + |
| 1611/1612 | D230A | + |
| 1613/1614 | V218A | + |
| 1615/1616 | I143R | + |
| 1617/1618 | W228S | + |
| 1619/1620 | E68L | + |
| 1621/1622 | K207T | + |
| 1623/1624 | W228R | + |
| 1625/1626 | F155A | + |
| 1627/1628 | Q136S | + |
| 1629/1630 | I150L | + |
| 1631/1632 | I150V | + |
| 1633/1634 | G227P | + |
| 1635/1636 | V129L | + |
| 1637/1638 | D230Q | + |
| 1639/1640 | D210V | + |
| 1641/1642 | I205L | + |
| 1643/1644 | E68G | + |
| 1645/1646 | E133W | + |
| 1647/1648 | F155W | + |
| 1649/1650 | S212R | + |
| 1651/1652 | K207A | + |
| 1653/1654 | Y151F | + |
| 1655/1656 | S212P | + |
| 1657/1658 | V218I | + |
| 1659/1660 | V129P | + |
| 1661/1662 | S43A | + |
| 1663/1664 | D230P | + |
| 1665/1666 | V129S | + |
| 1667/1668 | E68A | + |
| 1669/1670 | L142F | + |
| 1671/1672 | G204S | + |
| 1673/1674 | Q136Y | + |
| 1675/1676 | V182S | + |
| 1677/1678 | E133S | + |
| 1679/1680 | W228I | + |
| 1681/1682 | S43C | + |
| 1683/1684 | N217G | + |
| 1685/1686 | V129I | + |

Levels of increased activity were determined FIOP activity - fG relative to SEQ ID NO: 1388 and are defined as follows: “+” > 1.0, “++” > 1.22, “+++” > 1.5.

### Example 25

### Improvements Over SEQ ID NO: 1388 in Conversion of Nucleoside Monophosphates to Nucleotides

### HTP Screening for Improved AdyK Variants

[0745] Adenylate kinase of SEQ ID NO: 1388 was selected as the parent adenylate kinase enzyme. Libraries of genes were produced from the parent gene using various techniques (e.g. saturation mutagenesis and recombination of previously identified beneficial mutations). The polypeptides encoded by each gene were produced in HTP and prepared as described in Table 25.1.

[0746] Reactions were performed as described in Example 4 using conditions summarized in Table 25.1. Data were collected using the TdT-coupled reaction and CE assay described in Example 6.

TABLE 25.1
Reaction conditions

Lysis Buffer - TEoA (pH 7.5), 0.1 g/L lysozyme; Lysis Conditions - 100 μL, 50° C., 60 min;
Reaction buffer - 50 mM Tris, 50 mM LiK(acetylphosphate), 10 μM ATP, 10 mM magnesium
chloride, pH 8.0; Lysate concentration (vol %) - 2; Reaction Conditions - 1 μL, 30° C., 1 hr;
Nucleoside substrate - mA; Substrate Concentration - 10 mM; Auxiliary Cascade Enzymes
(AdoK/AcK)- SEQ ID NO: 1338 (10 μM), SEQ ID NO: 1318 (10 μM); Dilution into Coupling
Reaction - 800X; Substrate Oligonucleotides - SEQ ID NO: 1323, SEQ ID NO: 1324; Product
Oligonucleotides - SEQ ID NO: 2656, SEQ ID NO: 2657.

[0747] Activity relative to SEQ ID NO: 1388 (Activity FIOP) was calculated based on the percentage of extension products observed for the variant compared with the percentage observed with SEQ ID NO: 1388 (where the percent product may be set as the average of replicates or else the highest single sample as appropriate). The results are shown in Table 25.2.

TABLE 25.2
Adenylate kinase activity relative to SEQ ID NO: 1388

| | | FIOP activity - | FIOP activity - |
|---|---|---|---|
| SEQ ID NO: | Amino Acid Differences | mA relative to | fG relative to |
| (nt/aa) | (Relative to SEQ ID NO: 1388) | SEQ ID NO: 1388 | SEQ ID NO: 1388 |
| 1687/1688 | V82Q/Q136L/I150G/N217P | +++ | |
| 1689/1690 | Q136A/I150S | +++ | ++ |
| 1691/1692 | N79P/V81S/I143A/L156C/S212I/W228G | +++ | |
| 1693/1694 | V82Q/Q136A | ++ | ++ |
| 1695/1696 | N79P/V81S/I143A/S212I | ++ | |
| 1697/1698 | N217P | ++ | + |
| 1699/1700 | N79P/E133F/W228L | + | + |
| 1701/1702 | V81S/I143A/L156T/S212I | + | |
| 1703/1704 | Q136A/V219A | + | |
| 1705/1706 | V82Q/Q136A/L226P | + | |
| 1707/1708 | Q136A/I150S/N217P | + | +++ |
| 1709/1710 | Q136A/I150G | + | +++ |
| 1711/1712 | E133F | + | ++ |
| 1713/1714 | E133F/L156C | + | + |
| 1715/1716 | E133F/I143A/W228L | + | + |
| 1717/1718 | Q136L | + | |
| 1719/1720 | I150S/N217P | | ++ |
| 1721/1722 | V82Q/Q136A/I150S | | +++ |
| 1723/1724 | V81S | | +++ |
| 1725/1726 | V81S/1143T | | +++ |
| 1727/1728 | V81S/E133F/W228L | | +++ |
| 1729/1730 | I143A/W228L | | ++ |
| 1731/1732 | S212I/W228G | | ++ |
| 1733/1734 | N79P/V81S | | ++ |
| 1735/1736 | E133F/W228L | | + |
| 1737/1738 | E133F/S212M | | + |
| 1739/1740 | Q136L/N217H | | + |
| 1741/1742 | V82P/Q136L | | + |

and are defined as follows: “+” > 1.0, “++” > 1.4, “+++” > 1.9. Levels of increased activity were determined for FIOP activity - fG relative to SEQ ID NO: 1388 and are defined as follows: “+” > 1.0, “++” > 1.5, “+++” > 1.77.

### Example 26

### Improvements Over SEQ ID NO: 1388 in Conversion of Nucleoside Monophosphates to Nucleotides

### HTP Screening for Improved AdyK Variants

[0748] Adenylate kinase of SEQ ID NO: 1388 was selected as the parent adenylate kinase enzyme. Libraries of genes were produced from the parent gene using various techniques (e.g. saturation mutagenesis and recombination of previously identified beneficial mutations). The polypeptides encoded by each gene were produced in HTP and prepared as described in Table 26.1.

[0749] Reactions were performed as described in Example 4 using conditions summarized in Table 26.1. Data were collected using the TdT-coupled reaction and CE assay described in Example 6.

TABLE 26.1
Reaction conditions

Lysis Buffer - TEoA (pH 7.5), 0.1 g/L lysozyme; Lysis Conditions - 100 μL, 50° C., 60 min; Reaction
buffer - 50 mM Tris, 50 mM LiK(acetylphosphate), 10 μM ATP, 10 mM magnesium chloride, pH
8.0; Lysate concentration (vol %) - 2; Reaction Conditions - 1 μL, 30° C., 1 hr; Nucleoside substrate -
mA; Substrate Concentration - 10 mM; Auxiliary Cascade Enzymes (AdoK/AcK)- SEQ ID NO:
1340 (10 μM), SEQ ID NO: 1354 (10 μM); Dilution into Coupling Reaction - 800X; Substrate
Oligonucleotides - SEQ ID NO: 1323, SEQ ID NO: 1324; Product Oligonucleotides - SEQ ID NO:
2656, SEQ ID NO: 2657.

[0750] Activity relative to SEQ ID NO: 1388 (Activity FIOP) was calculated based on the percentage of extension products observed for the variant compared with the percentage observed with SEQ ID NO: 1388 (where the percent product may be set as the average of replicates or else the highest single sample as appropriate). The results are shown in Table 26.2.

TABLE 26.2
Adenylate kinase activity relative to SEQ ID NO: 1388

| | Amino Acid | | |
|---|---|---|---|
| | Differences | FIOP activity - | FIOP activity - |
| SEQ | (Relative to | mA relative to | mUMP relative to |
| ID NO: | SEQ ID | SEQ ID | SEQ ID |
| (nt/aa) | NO: 1388) | NO: 1388 | NO: 1388 |
| 1553/1554 | I143S | | +++ |
| 1557/1558 | Q136A | | + |
| 1559/1560 | I143T | | + |
| 1575/1576 | I143C | | ++ |
| 1579/1580 | I150S | | ++ |
| 1581/1582 | V219P | ++ | |
| 1589/1590 | I143G | + | +++ |
| 1591/1592 | V218L | + | |
| 1595/1596 | L142R | | +++ |
| 1599/1600 | S212L | + | |
| 1611/1612 | D230A | + | |
| 1619/1620 | E68L | | ++ |
| 1623/1624 | W228R | +++ | ++ |
| 1625/1626 | F155A | + | ++ |
| 1627/1628 | Q136S | + | ++ |
| 1633/1634 | G227P | | + |
| 1641/1642 | I205L | +++ | ++ |
| 1649/1650 | S212R | + | |
| 1651/1652 | K207A | + | + |
| 1653/1654 | Y151F | + | |
| 1657/1658 | V218I | + | |
| 1661/1662 | S43A | + | |
| 1669/1670 | L142F | | ++ |
| 1683/1684 | N217G | + | ++ |
| 1743/1744 | I127P | +++ | |
| 1745/1746 | N217E | ++ | + |
| 1747/1748 | D216H | ++ | |
| 1749/1750 | I215P | ++ | |
| 1751/1752 | I143P | ++ | |
| 1753/1754 | Y151R | ++ | |
| 1755/1756 | P22S | ++ | |
| 1757/1758 | D216P | ++ | + |
| 1759/1760 | S212M | + | |
| 1761/1762 | Y151A | + | |
| 1763/1764 | V219A | + | |
| 1765/1766 | Q213L | + | +++ |
| 1767/1768 | Q213P | + | |
| 1769/1770 | I127S | + | |
| 1771/1772 | I150C | + | |
| 1773/1774 | I215A | + | |
| 1775/1776 | K207L | + | |
| 1777/1778 | E133Q | + | |
| 1779/1780 | S212W | + | |
| 1781/1782 | V219G | + | |
| 1783/1784 | G204R | + | |
| 1785/1786 | V219S | + | |

Levels of increased activity were determined for FIOP activity - mA relative to SEQ ID NO: 1388 and are defined as follows: “+” > 1.1, “++” > 1.4, “+++” > 1.7. Levels of increased activity were determined for FIOP activity - mUMP relative to SEQ ID NO: 1388 and are defined as follows: “+” > 1.1, “++” > 1.25, “+++” > 1.4.

### Example 27

### Improvements Over SEQ ID NO: 1708 in Conversion of Nucleoside Monophosphates to Nucleotides

### HTP Screening for Improved AdyK Variants

[0751] Adenylate kinase of SEQ ID NO: 1708 was selected as the parent adenylate kinase enzyme. Libraries of genes were produced from the parent gene using various techniques (e.g. saturation mutagenesis and recombination of previously identified beneficial mutations). The polypeptides encoded by each gene were produced in HTP and prepared as described in Table 27.1.

[0752] Reactions were performed as described in Example 4 using conditions summarized in Table 27.1. Data were collected using the TdT-coupled reaction and CE assay described in Example 6.

TABLE 27.1
Reaction conditions

Lysis Buffer - TEoA (pH 7.5), 0.1 g/L lysozyme; Lysis Conditions - 100 μL, 50° C., 60 min; Reaction
buffer - 50 mM Tris, 50 mM LiK(acetylphosphate), 10 μM ATP, 10 mM magnesium chloride, pH
8.0; Lysate concentration (vol %) - 0.5; Reaction Conditions - 1 μL, 30° C., 1 hr; Nucleoside substrate -
mA; Substrate Concentration - 10 mM; Auxiliary Cascade Enzymes (AdoK/AcK) - SEQ ID NO:
1340 (10 μM), SEQ ID NO: 1354 (10 μM); Dilution into Coupling Reaction - 800X; Substrate
Oligonucleotides - SEQ ID NO: 1323, SEQ ID NO: 1324; Product Oligonucleotides - SEQ ID NO:
2656, SEQ ID NO: 2657.

[0753] Activity relative to SEQ ID NO: 1708 (Activity FIOP) was calculated based on the percentage of extension products observed for the variant compared with the percentage observed with SEQ ID NO: 1708 (where the percent product may be set as the average of replicates or else the highest single sample as appropriate). The results are shown in Table 27.2.

TABLE 27.2
Adenylate kinase activity relative to SEQ ID NO: 1708

| | | FIOP activity - |
|---|---|---|
| SEQ ID NO: | Amino Acid Differences | mA relative to |
| (nt/aa) | (Relative to SEQ ID NO: 1708) | SEQ ID NO: 1708 |
| 1787/1788 | I127P | ++++ |
| 1789/1790 | I143S/F155A/V219P/W228R | ++++ |
| 1791/1792 | V219P | ++++ |
| 1793/1794 | I127P/L142R | ++++ |
| 1795/1796 | L142R/Y151A/K207A/V218A | ++++ |
| 1797/1798 | I143G/Q213L | ++++ |
| 1799/1800 | Y151A/V218A | ++++ |
| 1801/1802 | I127P/L142R/V218I | ++++ |
| 1803/1804 | L142R/Y151A | +++ |
| 1805/1806 | I143S/F155A/I205L/Q213L/W228R | +++ |
| 1807/1808 | I127P/L142R/K207A | +++ |
| 1809/1810 | I127P/D216P/V218A | +++ |
| 1811/1812 | L142R/Y151A/K207A | +++ |
| 1813/1814 | I143S/V219P | +++ |
| 1815/1816 | I127P/K207A | +++ |
| 1817/1818 | I127P/V218I | +++ |
| 1819/1820 | I143G/V219P/W228R | +++ |
| 1821/1822 | I127P/D216P | +++ |
| 1823/1824 | E68L/I127P/K207L | +++ |
| 1825/1826 | I143G/F155A/S212R/W228R | +++ |
| 1827/1828 | Y151A | +++ |
| 1829/1830 | I143S/V219P/W228R | +++ |
| 1831/1832 | I143S/Q213L/W228R | +++ |
| 1833/1834 | I143G/F155A/I205L | +++ |
| 1835/1836 | Y151A/K207A/D216P | +++ |
| 1837/1838 | I143G/W228R | +++ |
| 1839/1840 | E68L/I127P/K207A | ++ |
| 1841/1842 | E68L/I127P/K207A/V218A | ++ |
| 1843/1844 | I143G/F155A | ++ |
| 1845/1846 | I143G | ++ |
| 1847/1848 | I205L/Q213L/V219P | ++ |
| 1849/1850 | F155A/S212R/V219P/W228R | ++ |
| 1851/1852 | I143S/W228R | ++ |
| 1853/1854 | I205L/V219P/W228R | ++ |
| 1855/1856 | I143G/I205L | ++ |
| 1857/1858 | L142R/K207A | ++ |
| 1859/1860 | I143G/I205L/V219P | ++ |
| 1861/1862 | I143G/S212R/Q213L | ++ |
| 1863/1864 | I127P/K207L/V218I | ++ |
| 1865/1866 | L142R | ++ |
| 1867/1868 | I127P/D216P/V218I | ++ |
| 1869/1870 | I127P/L142R/Y151A/K207A/V218I | ++ |
| 1871/1872 | I143S/I205L/V219P/W228R | ++ |
| 1873/1874 | I205L/Q213L/W228R | ++ |
| 1875/1876 | I143G/V219P | + |
| 1877/1878 | L142R/K207L | + |
| 1879/1880 | E68L/Y151A/K207L | + |
| 1881/1882 | I143S/Q213L | + |
| 1883/1884 | L142R/Y151A/K207L | + |
| 1885/1886 | I127P/L142R/K207L | + |
| 1887/1888 | E68L/I127P/L142R/K207L | + |
| 1889/1890 | I143S/I205L | + |
| 1891/1892 | E68L/I127P | + |
| 1893/1894 | V218A | + |
| 1895/1896 | I127P/L142R/V196I | + |
| 1897/1898 | L142R/K207L/V218A | + |
| 1899/1900 | I143S/F155A | + |
| 1901/1902 | I143S | + |
| 1903/1904 | E68L/L142R/D216P | + |
| 1905/1906 | E68L/I127P/D216P/V218I | + |
| 1907/1908 | E68L/I127P/V218I | + |
| 1909/1910 | Y151A/D216P/V218I | + |
| 1911/1912 | I143S/S212R/W228R | + |
| 1913/1914 | I127P/L142R/Y151A | + |
| 1915/1916 | Y151A/K207L | + |
| 1917/1918 | I127P/L142R/D216P | + |
| 1919/1920 | V129I/K207A/V218A | + |
| 1921/1922 | L142R/K207L/V218I | + |
| 1923/1924 | E68L/L142R/Y151A/K207A | + |
| 1925/1926 | Y151A/K207A | + |
| 1927/1928 | E68L/L142R/Y151A | + |
| 1929/1930 | Y151A/K207L/V218I | + |
| 1931/1932 | W228R | + |
| 1933/1934 | F155A/Q213L | + |
| 1935/1936 | I127P/L142R/Y151A/V218I | + |
| 1937/1938 | I127P/Y151A | + |
| 1939/1940 | F155A/W228R | + |
| 1941/1942 | I143S/F155A/I205L | + |
| 1943/1944 | Y151A/D216P/V218A | + |
| 1945/1946 | E68L/L142R/K207L | + |
| 1947/1948 | A80V/Y151A/K207L | + |
| 1949/1950 | I205L/W228R | + |

Levels of increased activity were determined FIOP activity - mA relative to SEQ ID NO: 1708 and are defined as follows: “+” > 1.8, “++” > 4.7, “+++” > 6.6, “++++” > 9.0.

### Example 28

### Improvements Over SEQ ID NO: 1708 in Conversion of Nucleoside Monophosphates to Nucleotides

### HTP Screening for Improved AdyK Variants

[0754] Adenylate kinase of SEQ ID NO: 1708 was selected as the parent adenylate kinase enzyme. Libraries of genes were produced from the parent gene using various techniques (e.g. saturation mutagenesis and recombination of previously identified beneficial mutations). The polypeptides encoded by each gene were produced in HTP and prepared as described in Table 28.1.

[0755] Reactions were performed as described in Example 4 using conditions summarized in Table 28.1. Data were collected using the TdT-coupled reaction and CE assay described in Example 6.

TABLE 28.1
Reaction conditions

Lysis Buffer - TEoA (pH 7.5), 0.1 g/L lysozyme; Lysis Conditions - 100 μL, 50° C., 60 min; Reaction
buffer - 50 mM Tris, 50 mM LiK(acetylphosphate), 10 μM ATP, 10 mM magnesium chloride, pH 8.0;
Lysate concentration (vol %) - 2; Reaction Conditions - 1 μL, 30° C., 1 hr; Nucleoside substrate -
mUMP; Substrate Concentration - 10 mM; Auxiliary Cascade Enzymes (AdoK/AcK) - SEQ ID NO:
1340 (10 μM), SEQ ID NO: 1354 (10 μM); Dilution into Coupling Reaction - 800X; Substrate
Oligonucleotides - SEQ ID NO: 1323, SEQ ID NO: 1324; Product Oligonucleotides - SEQ ID NO:
1333, SEQ ID NO: 1334.

[0756] Activity relative to SEQ ID NO: 1708 (Activity FIOP) was calculated based on the percentage of extension products observed for the variant compared with the percentage observed with SEQ ID NO: 1708 (where the percent product may be set as the average of replicates or else the highest single sample as appropriate). The results are shown in Table 28.2.

TABLE 28.2
Adenylate kinase activity relative to SEQ ID NO: 1708

| | | FIOP activity - |
|---|---|---|
| SEQ ID NO: | Amino Acid Differences | mUMP relative to |
| (nt/aa) | (Relative to SEQ ID NO: 1708) | SEQ ID NO: 1708 |
| 1951/1952 | E68L/L142R/K207A/D216P/V218I | +++ |
| 1953/1954 | E68L/V218I | +++ |
| 1955/1956 | E68L/K207A | +++ |
| 1957/1958 | D216P/V218I | ++ |
| 1959/1960 | E68L/L142R | ++ |
| 1961/1962 | S212R | + |
| 1963/1964 | E68L/K207L | + |
| 1965/1966 | I205L | + |
| 1967/1968 | L142R/K207A/D216P/V218I | + |

Levels of increased activity were determined FIOP activity - mUMP relative to SEQ ID NO: 1708 and are defined as follows: “+” > 1.1, “++” > 1.3, “+++” > 1.5.

### Example 29

### Improvements Over SEQ ID NO: 1952 in Conversion of Nucleoside Monophosphates to Nucleotides

### HTP Screening for Improved AdyK Variants

[0757] Adenylate kinase of SEQ ID NO: 1952 was selected as the parent adenylate kinase enzyme. Libraries of genes were produced from the parent gene using various techniques (e.g., saturation mutagenesis and recombination of previously identified beneficial mutations). The polypeptides encoded by each gene were produced in HTP and prepared as described in Table 29.1.

[0758] Reactions were performed as described in Example 4 using conditions summarized in Table 29.1. Data were collected using the TdT-coupled reaction and CE assay described in Example 6.

TABLE 29.1
Reaction conditions

Lysis Buffer - TEoA (pH 7.5), 0.1 g/L lysozyme; Lysis Conditions - 100 μL, 63° C., 60 min; Reaction
buffer - 50 mM Tris, 50 mM LiK(acetylphosphate), 10 μM ATP, 10 mM magnesium chloride, pH
8.0; Lysate concentration (vol %) - 5; Reaction Conditions - 1 μL, 30° C., 1 hr; Nucleoside substrate -
fG; Substrate Concentration - 10 mM; Auxiliary Cascade Enzymes (AdoK/AcK) - SEQ ID NO: 1342
(10 μM), SEQ ID NO: 1354 (10 μM); Dilution into Coupling Reaction - 800X; Substrate
Oligonucleotides - SEQ ID NO: 1323, SEQ ID NO: 1324; Product Oligonucleotides - SEQ ID NO:
2654, SEQ ID NO: 2655.

[0759] Stability relative to SEQ ID NO: 1952 (Stability FIOP) was calculated based on the percentage of extension products observed for the variant compared with the percentage observed with SEQ ID NO: 1952 (where the percent product may be set as the average of replicates or else the highest single sample as appropriate). The results are shown in Table 29.2.

TABLE 29.2
Adenylate kinase activity relative to SEQ ID NO: 1952

| | | FIOP stability |
|---|---|---|
| SEQ ID NO: | Amino Acid Differences | relative to |
| (nt/aa) | (Relative to SEQ ID NO: 1952) | SEQ ID NO: 1952 |
| 1969/1970 | F18L/N118G | +++ |
| 1971/1972 | S87M/R119K/K192A | +++ |
| 1973/1974 | R119K/Q173R/K192A | +++ |
| 1975/1976 | N118G | +++ |
| 1977/1978 | S87M/R119K | +++ |
| 1979/1980 | F18L/N118G/G170S | ++ |
| 1981/1982 | F18L | ++ |
| 1983/1984 | R119K | ++ |
| 1985/1986 | K192A | ++ |
| 1987/1988 | S87E | ++ |
| 1989/1990 | S87M | ++ |
| 1991/1992 | K89Q | ++ |
| 1993/1994 | K192I | ++ |
| 1995/1996 | V59L | + |
| 1997/1998 | G170S | + |
| 1999/2000 | K64R | + |
| 2001/2002 | S112N | + |
| 2003/2004 | K93E | + |
| 2005/2006 | H184S | + |
| 2007/2008 | K146N | + |
| 2009/2010 | S112K | + |
| 2011/2012 | I51T | + |
| 2013/2014 | V125I | + |
| 2015/2016 | K93S | + |
| 2017/2018 | K192W | + |
| 2019/2020 | S112A | + |
| 2021/2022 | E191D | + |
| 2023/2024 | I51M | + |
| 2025/2026 | Q117L | + |
| 2027/2028 | K93Y | + |
| 2029/2030 | V172T | + |
| 2031/2032 | L163Q | + |

Levels of increased activity were determined FIOP stability relative to SEQ ID NO: 1952 and are defined as follows: “+” > 1.3, “++” > 2.6, “+++” > 7.5.

### Example 30

### Improvements Over SEQ ID NO: 1980 in Conversion of Nucleoside Monophosphates to Nucleotides

### HTP Screening for Improved AdyK Variants

[0760] Adenylate kinase of SEQ ID NO: 1980 was selected as the parent adenylate kinase enzyme. Libraries of genes were produced from the parent gene using various techniques (e.g. saturation mutagenesis and recombination of previously identified beneficial mutations). The polypeptides encoded by each gene were produced in HTP and prepared as described in Table 30.1.

[0761] Reactions were performed as described in Example 4 using conditions summarized in Table 30.1. Data were collected using the TdT-coupled reaction and CE assay described in Example 6.

TABLE 30.1
Reaction conditions

Lysis Buffer - TEoA (pH 7.5), 0.1 g/L lysozyme; Lysis Conditions - 100 μL, 68° C., 60 min; Reaction
buffer - 50 mM Tris, 50 mM LiK(acetylphosphate), 10 μM ATP, 10 mM magnesium chloride, pH 8.0;
Lysate concentration (vol %) - 5; Reaction Conditions - 1 μL, 30° C., 1 hr; Nucleoside substrate - fG;
Substrate Concentration - 10 mM; Auxiliary Cascade Enzymes (AdoK/AcK) - SEQ ID NO: 1344 (10
μM), SEQ ID NO: 1354 (10 μM); Dilution into Coupling Reaction - 800X; Substrate
Oligonucleotides - SEQ ID NO: 1323, SEQ ID NO: 1324; Product Oligonucleotides - SEQ ID NO:
2654, SEQ ID NO: 2655.

[0762] Stability relative to SEQ ID NO: 1980 (Stability FIOP) was calculated based on the percentage of extension products observed for the variant compared with the percentage observed with SEQ ID NO: 1980 (where the percent product may be set as the average of replicates or else the highest single sample as appropriate). The results are shown in Table 30.2.

TABLE 30.2
Adenylate kinase activity relative to SEQ ID NO: 1980

| | | FIOP stability |
|---|---|---|
| SEQ ID NO: | Amino Acid Differences | relative to |
| (nt/aa) | (Relative to SEQ ID NO: 1980) | SEQ ID NO: 1980 |
| 2033/2034 | S87E/R119K/K192A | +++ |
| 2035/2036 | S87E/K192A | +++ |
| 2037/2038 | S87E/R119K | +++ |
| 2039/2040 | R119K/K192A | +++ |
| 2041/2042 | S87M/R119K | ++ |
| 2043/2044 | K192A | ++ |
| 2045/2046 | R119K | ++ |
| 2047/2048 | K146N/K192A | ++ |
| 2049/2050 | S87E | ++ |
| 2051/2052 | S87M/K192A | + |
| 2053/2054 | S87M | + |
| 2055/2056 | V59L/S87E | + |
| 2057/2058 | V59L/S87E/S112A/K146N | + |
| 2059/2060 | K146N | + |
| 2061/2062 | S87E/S112A/R119K | + |

Levels of increased activity were determined FIOP stability relative to SEQ ID NO: 1980 and are defined as follows: “+” > 1.2, “++” > 2.0, “+++” > 3.1.

### Example 31

### Improvements Over SEQ ID NO: 1980 in Conversion of Nucleoside Monophosphates to Nucleotides

### HTP Screening for Improved AdyK Variants

[0763] Adenylate kinase of SEQ ID NO: 1980 was selected as the parent adenylate kinase enzyme. Libraries of genes were produced from the parent gene using various techniques (e.g. saturation mutagenesis and recombination of previously identified beneficial mutations). The polypeptides encoded by each gene were produced in HTP and prepared as described in Table 31.1.

[0764] Reactions were performed as described in Example 4 using conditions summarized in Table 31.1. Data were collected using the TdT-coupled reaction and CE assay described in Example 6.

TABLE 31.1
Reaction conditions

Lysis Buffer - TEoA (pH 7.5), 0.1 g/L lysozyme; Lysis Conditions - 100 μL, 50° C., 60 min; Reaction
buffer - 50 mM Tris, 50 mM LiK(acetylphosphate), 10 μM ATP, 10 mM magnesium chloride, pH 8.0;
Lysate concentration (vol %) - 25; Reaction Conditions - 1 μL, 30° C., 1 hr; Nucleoside substrate -
mGMP; Substrate Concentration - 10 mM; Auxiliary Cascade Enzymes (AdoK/AcK) - SEQ ID NO:
1344 (10 μM), SEQ ID NO: 1354 (10 μM); Dilution into Coupling Reaction - 80000X; Substrate
Oligonucleotides - SEQ ID NO: 1323, SEQ ID NO: 1324; Product Oligonucleotides - SEQ ID NO:
T15mGmAmCmG, SEQ ID NO: 2660.

[0765] Activity relative to SEQ ID NO: 1980 (Activity FIOP) was calculated based on the percentage of extension products observed for the variant compared with the percentage observed with SEQ ID NO: 1980 (where the percent product may be set as the average of replicates or else the highest single sample as appropriate). The results are shown in Table 31.2.

TABLE 31.2
Adenylate kinase activity relative to SEQ ID NO: 1980

| | | FIOP activity - |
|---|---|---|
| SEQ ID NO: | Amino Acid Differences | mGMP relative to |
| (nt/aa) | (Relative to SEQ ID NO: 1980) | SEQ ID NO: 1980 |
| 2063/2064 | P74G | +++ |
| 2065/2066 | D75L | +++ |
| 2067/2068 | I66A | +++ |
| 2069/2070 | T181V | +++ |
| 2071/2072 | I66W | +++ |
| 2073/2074 | I66G | +++ |
| 2075/2076 | I66Q | ++ |
| 2077/2078 | V81F | ++ |
| 2079/2080 | I66H | ++ |
| 2081/2082 | V73R | ++ |
| 2083/2084 | I66N | ++ |
| 2085/2086 | L77S | ++ |
| 2087/2088 | L77A | ++ |
| 2089/2090 | I66D | ++ |
| 2091/2092 | I66V | ++ |
| 2093/2094 | V188L | ++ |
| 2095/2096 | L77Q | + |
| 2097/2098 | V73I | + |
| 2099/2100 | P216E | + |
| 2101/2102 | V82L | + |
| 2103/2104 | A136L | + |
| 2105/2106 | G214L | + |
| 2107/2108 | V188G | + |
| 2109/2110 | G214T | + |
| 2111/2112 | P21S | + |
| 2113/2114 | I66T | + |
| 2115/2116 | P217E | + |
| 2117/2118 | I154R | + |
| 2119/2120 | P216T | + |
| 2121/2122 | E133V | + |
| 2123/2124 | E71T | + |
| 2125/2126 | G214R | + |
| 2127/2128 | A136I | + |
| 2129/2130 | S212H | + |
| 2131/2132 | G214P | + |
| 2133/2134 | W228Q | + |

Levels of increased activity were determined FIOP activity - mGMP relative to SEQ ID NO: 1980 and are defined as follows: “+” > 1.2, “++” > 1.7, “+++” > 2.5.

### Example 32

### Improvements Over SEQ ID NO: 2072 in Conversion of Nucleoside Monophosphates to Nucleotides

### HTP Screening for Improved AdyK Variants

[0766] Adenylate kinase of SEQ ID NO: 2072 was selected as the parent adenylate kinase enzyme. Libraries of genes were produced from the parent gene using various techniques (e.g. saturation mutagenesis and recombination of previously identified beneficial mutations). The polypeptides encoded by each gene were produced in HTP and prepared as described in Table 32.1.

[0767] Reactions were performed as described in Example 4 using conditions summarized in Table 32.1. Data were collected using the TdT-coupled reaction and CE assay described in Example 6.

TABLE 32.1
Reaction conditions

Lysis Buffer - TEoA (pH 7.5), 0.1 g/L lysozyme; Lysis Conditions - 100 μL, 50° C., 60 min; Reaction
buffer - 50 mM Tris, 50 mM LiK(acetylphosphate), 10 μM ATP, 10 mM magnesium chloride, pH
8.0; Lysate concentration (vol %) - 25; Reaction Conditions - 1 μL, 30° C., 1 hr; Nucleoside substrate -
mGMP; Substrate Concentration - 10 mM; Auxiliary Cascade Enzymes (AcK) - SEQ ID NO: 1354
(10 μM); Dilution into Coupling Reaction - 160X; Substrate Oligonucleotides - SEQ ID NO: 1323,
SEQ ID NO: 1324; Product Oligonucleotides - SEQ ID NO: 2659, SEQ ID NO: 2660.

[0768] Activity relative to SEQ ID NO: 2072 (Activity FlOP) was calculated based on the percentage of extension products observed for the variant compared with the percentage observed with SEQ ID NO: 2072 (where the percent product may be set as the average of replicates or else the highest single sample as appropriate). The results are shown in Table 32.2.

TABLE 32.2
Adenylate kinase activity relative to SEQ ID NO: 2072

| | | FIOP activity - |
|---|---|---|
| SEQ ID NO: | Amino Acid Differences | mGMP relative to |
| (nt/aa) | (Relative to SEQ ID NO: 2072) | SEQ ID NO: 2072 |
| 2135/2136 | S87R | +++ |
| 2137/2138 | S87K | +++ |
| 2139/2140 | S87L | +++ |
| 2141/2142 | Q194R | +++ |
| 2143/2144 | I197L | ++ |
| 2145/2146 | S87Y | ++ |
| 2147/2148 | K93G | ++ |
| 2149/2150 | K202E | ++ |
| 2151/2152 | G38C | ++ |
| 2153/2154 | C91V | ++ |
| 2155/2156 | Q194L | ++ |
| 2157/2158 | R183L | ++ |
| 2159/2160 | K93T | ++ |
| 2161/2162 | I39T | ++ |
| 2163/2164 | C91L | ++ |
| 2165/2166 | K146H | ++ |
| 2167/2168 | K203E | ++ |
| 2169/2170 | K203L | + |
| 2171/2172 | K146N | + |
| 2173/2174 | T37G | + |
| 2175/2176 | Q194Y | + |
| 2177/2178 | T37R | + |
| 2179/2180 | E92L | + |
| 2181/2182 | K36R | + |
| 2183/2184 | K36S | + |
| 2185/2186 | K89T | + |
| 2187/2188 | E131A | + |
| 2189/2190 | D132T | + |
| 2191/2192 | D90F | + |
| 2193/2194 | I197Q | + |
| 2195/2196 | D90V | + |
| 2197/2198 | G148S | + |
| 2199/2200 | C91S | + |
| 2201/2202 | A35E/I197V | + |
| 2203/2204 | D132V | + |
| 2205/2206 | I197A | + |
| 2207/2208 | I197V | + |
| 2209/2210 | K93P | + |
| 2211/2212 | E92S | + |
| 2213/2214 | K36M | + |
| 2215/2216 | I39A | + |
| 2217/2218 | Q194V | + |
| 2219/2220 | S87V | + |
| 2221/2222 | D132G | + |
| 2223/2224 | G38F | + |
| 2225/2226 | D90T | + |
| 2227/2228 | K231R | + |
| 2229/2230 | G148F | + |
| 2231/2232 | C91G | + |
| 2233/2234 | C91A | + |

Levels of increased activity were determined FIOP activity - mGMP relative to SEQ ID NO: 2072 and are defined as follows: “+” > 1.3, “++” > 1.8, “+++” > 2.3.

### Improvements Over SEQ ID NO: 2072 in Conversion of Nucleoside Monophosphates to Nucleotides

### HTP Screening for Improved AdyK Variants

[0769] Adenylate kinase of SEQ ID NO: 2072 was selected as the parent adenylate kinase enzyme. Libraries of genes were produced from the parent gene using various techniques (e.g., saturation mutagenesis and recombination of previously identified beneficial mutations). The polypeptides encoded by each gene were produced in HTP and prepared as described in Table 33.1.

[0770] Reactions were performed as described in Example 4 using conditions summarized in Table 33.1. Data were collected using the TdT-coupled reaction and CE assay described in Example 6.

TABLE 33.1
Reaction conditions

Lysis Buffer - TEoA (pH 7.5), 0.1 g/L lysozyme; Lysis Conditions - 100 μL, 62° C., 60 min; Reaction
buffer - 50 mM Tris, 50 mM LiK(acetylphosphate), 10 μM ATP, 10 mM magnesium chloride, pH 8.0;
Lysate concentration (vol %) - 5; Reaction Conditions - 1 μL, 30° C., 1 hr; Nucleoside substrate - fG;
Substrate Concentration - 10 mM; Auxiliary Cascade Enzymes (AdoK/AcK) - SEQ ID NO: 1346 (10
μM), SEQ ID NO: 1354 (10 μM); Dilution into Coupling Reaction - 800X; Substrate
Oligonucleotides - SEQ ID NO: 1323, SEQ ID NO: 1324; Product Oligonucleotides - SEQ ID NO:
2654, SEQ ID NO: 2655.

[0771] Stability relative to SEQ ID NO: 2072 (Stability FIOP) was calculated based on the percentage of extension products observed for the variant compared with the percentage observed with SEQ ID NO: 2072 (where the percent product may be set as the average of replicates or else the highest single sample as appropriate). The results are shown in Table 33.2.

TABLE 33.2
Adenylate kinase activity relative to SEQ ID NO: 2072

| | | FIOP stability |
|---|---|---|
| SEQ ID NO: | Amino Acid Differences | relative to |
| (nt/aa) | (Relative to SEQ ID NO: 2072) | SEQ ID NO: 2072 |
| 2149/2150 | K202E | + |
| 2201/2202 | A35E/I197V | + |
| 2213/2214 | K36M | +++ |
| 2227/2228 | K231R | ++ |
| 2235/2236 | K36I | +++ |
| 2237/2238 | S87E | +++ |
| 2239/2240 | T37L | +++ |
| 2241/2242 | K231T | ++ |
| 2243/2244 | K231A | ++ |
| 2245/2246 | K89P | ++ |
| 2247/2248 | K202S | ++ |
| 2249/2250 | K36E | ++ |
| 2251/2252 | K231Q | ++ |
| 2253/2254 | S87A | + |
| 2255/2256 | K146V | + |
| 2257/2258 | K146R | + |
| 2259/2260 | N56T | + |
| 2261/2262 | K93A | + |
| 2263/2264 | K203R | + |

Levels of increased activity were determined FIOP stability relative to SEQ ID NO: 2072 and are defined as follows: “+” > 1.5, “++” > 1.8, “+++” > 2.4.

### Example 34

### Improvements Over SEQ ID NO: 2138 in Conversion of Nucleoside Monophosphates to Nucleotides

### HTP Screening for Improved AdyK Variants

[0772] Adenylate kinase of SEQ ID NO: 2138 was selected as the parent adenylate kinase enzyme. Libraries of genes were produced from the parent gene using various techniques (e.g. saturation mutagenesis and recombination of previously identified beneficial mutations). The polypeptides encoded by each gene were produced in HTP and prepared as described in Table 34.1.

[0773] Reactions were performed as described in Example 4 using conditions summarized in Table 34.1. Data were collected using the TdT-coupled reaction and CE assay described in Example 6.

TABLE 34.1
Reaction conditions

Lysis Buffer - TEoA (pH 7.5), 0.1 g/L lysozyme; Lysis Conditions - 100 μL, 50° C., 60 min; Reaction
buffer - 50 mM Tris, 50 mM LiK(acetylphosphate), 10 μM ATP, 10 mM magnesium chloride, pH 8.0;
Lysate concentration (vol %) - 25; Reaction Conditions - 1 μL, 30° C., 1 hr; Nucleoside substrate - mG;
Substrate Concentration - 10 mM; Auxiliary Cascade Enzymes (AdoK/AcK) - SEQ ID NO: 1348 (10
μM), SEQ ID NO: 1354 (10 μM); Dilution into Coupling Reaction - 160X; Substrate
Oligonucleotides - SEQ ID NO: 1323, SEQ ID NO: 1324; Product Oligonucleotides - SEQ ID NO:
2659, SEQ ID NO: 2660.

[0774] Activity relative to SEQ ID NO: 2138 (Activity FIOP) was calculated based on the percentage of extension products observed for the variant compared with the percentage observed with SEQ ID NO: 2138 (where the percent product may be set as the average of replicates or else the highest single sample as appropriate). The results are shown in Table 34.2.

TABLE 34.2
Adenylate kinase activity relative to SEQ ID NO: 2138

| | | FIOP activity - |
|---|---|---|
| SEQ ID NO: | Amino Acid Differences | mG relative to |
| (nt/aa) | (Relative to SEQ ID NO: 2138) | SEQ ID NO: 2138 |
| 2265/2266 | D161G | +++ |
| 2267/2268 | E162G | +++ |
| 2269/2270 | M153C | +++ |
| 2271/2272 | P216L | ++ |
| 2273/2274 | S212Q | + |
| 2275/2276 | P216H | + |
| 2277/2278 | L156V | + |
| 2279/2280 | D161L | + |
| 2281/2282 | G214W | + |
| 2283/2284 | S229C | + |
| 2285/2286 | P216M | + |
| 2287/2288 | P216V | + |
| 2289/2290 | G214A | + |
| 2291/2292 | G214M | + |

Levels of increased activity were determined FIOP activity - mG relative to SEQ ID NO: 2138 and are defined as follows: “+” > 1.1, “++” > 1.25, “+++” > 1.5.

### Example 35

### Improvements Over SEQ ID NO: 2138 in Conversion of Nucleoside Monophosphates to Nucleotides

### HTP Screening for Improved AdyK Variants

[0775] Adenylate kinase of SEQ ID NO: 2138 was selected as the parent adenylate kinase enzyme. Libraries of genes were produced from the parent gene using various techniques (e.g. saturation mutagenesis and recombination of previously identified beneficial mutations). The polypeptides encoded by each gene were produced in HTP and prepared as described in Table 35.1.

[0776] Reactions were performed as described in Example 4 using conditions summarized in Table 35.1. Data were collected using the TdT-coupled reaction and CE assay described in Example 6.

TABLE 35.1
Reaction conditions

Lysis Buffer - TEoA (pH 7.5), 0.1 g/L lysozyme; Lysis Conditions - 100 μL, 50° C., 60 min; Reaction
buffer - 50 mM Tris, 50 mM LiK(acetylphosphate), 10 μM ATP, 10 mM magnesium chloride, pH 8.0;
Lysate concentration (vol %) - 10; Reaction Conditions - 1 μL, 30° C., 1 hr; Nucleoside substrate - mG;
Substrate Concentration - 10 mM; Auxiliary Cascade Enzymes (AdoK/AcK) - SEQ ID NO: 1350 (10
μM), SEQ ID NO: 1354 (10 μM); Dilution into Coupling Reaction - 160X; Substrate
Oligonucleotides - SEQ ID NO: 1323, SEQ ID NO: 1324; Product Oligonucleotides - SEQ ID NO:
2659, SEQ ID NO: 2660.

[0777] Activity relative to SEQ ID NO: 2138 (Activity FIOP) was calculated based on the percentage of extension products observed for the variant compared with the percentage observed with SEQ ID NO: 2138 (where the percent product may be set as the average of replicates or else the highest single sample as appropriate). The results are shown in Table 35.2.

TABLE 35.2
Adenylate kinase activity relative to SEQ ID NO: 2138

| | | FIOP activity - |
|---|---|---|
| SEQ ID NO: | Amino Acid Differences | mG relative to |
| (nt/aa) | (Relative to SEQ ID NO: 2138) | SEQ ID NO: 2138 |
| 2293/2294 | L77I/I143V/G214E/P216R | +++ |
| 2295/2296 | I143V/L156V/P216R | +++ |
| 2297/2298 | L77I/I143V | +++ |
| 2299/2300 | L77I/I143V/P216R | +++ |
| 2301/2302 | L77I/G214E/P216R | +++ |
| 2303/2304 | L77I/P216L | ++ |
| 2305/2306 | I143V/L156V | ++ |
| 2307/2308 | L156V/P216R | ++ |
| 2309/2310 | I143V | ++ |
| 2311/2312 | L77I/G214E/P216L | ++ |
| 2313/2314 | L77I | ++ |
| 2315/2316 | L77I/G214E | ++ |
| 2317/2318 | L77I/I143V/D161L/E162G/ | ++ |
| | S212Q/G214E | |
| 2319/2320 | L77I/E162G/G214E/P216L | + |
| 2321/2322 | L77I/I143V/L156V/G214E/P216L | + |
| 2323/2324 | L77I/I143V/L156V/E162G/ | + |
| | S212Q/P216R | |
| 2325/2326 | L77I/I143V/L156V/D161L/ | + |
| | G214E/P216R | |
| 2327/2328 | L77I/P216R | + |
| 2329/2330 | L77I/L156V/E162G/P216R | + |
| 2331/2332 | L156V/D161L/G214E/P216L | + |
| 2333/2334 | L77I/I143V/E162G/G214W/P216L | + |
| 2335/2336 | I143V/P216L | + |
| 2337/2338 | G214E/P216L | + |
| 2339/2340 | I143V/L156V/G214E/P216R | + |
| 2341/2342 | I143V/G214E/P216L | + |
| 2343/2344 | I143V/G214E/P216R | + |
| 2345/2346 | G214E | + |
| 2347/2348 | L77I/I143V/S212Q/P216R | + |
| 2349/2350 | I143V/L156V/D161L/E162G/P216R | + |
| 2351/2352 | L156V/E162G/G214E | + |
| 2353/2354 | L77I/I143V/L156V/D161L/E162G | + |
| 2355/2356 | I143V/D161L/G214E/P216R | + |
| 2357/2358 | L77I/D161L/P216R | + |
| 2359/2360 | I143V/S212Q/G214E/P216R | + |
| 2361/2362 | L77I/I143V/G214W/P216R | + |
| 2363/2364 | I143V/P216R | + |
| 2365/2366 | P216R | |

Levels of increased activity were determined FIOP activity - mG relative to SEQ ID NO: 2138 and are defined as follows: “+” > 1.3, “++” > 2.3, “+++” > 2.9.

### Example 36

### Improvements Over SEQ ID NO: 2294 in Conversion of Nucleoside Monophosphates to Nucleotides

### HTP Screening for Improved AdyK Variants

[0778] Adenylate kinase of SEQ ID NO: 2294 was selected as the parent adenylate kinase enzyme. Libraries of genes were produced from the parent gene using various techniques (e.g. saturation mutagenesis and recombination of previously identified beneficial mutations). The polypeptides encoded by each gene were produced in HTP and prepared as described in Table 36.1.

[0779] Reactions were performed as described in Example 4 using conditions summarized in Table 36.1. Data were collected using the TdT-coupled reaction and CE assay described in Example 6.

TABLE 36.1
Reaction conditions

Lysis Buffer - TEoA (pH 7.5), 0.1 g/L lysozyme; Lysis Conditions - 100 μL, 50° C., 60 min; Reaction
buffer - 50 mM Tris, 50 mM LiK(acetylphosphate), 10 μM ATP, 10 mM magnesium chloride, pH 8.0;
Lysate concentration (vol %) - 10; Reaction Conditions - 1 μL, 30° C., 1 hr; Nucleoside substrate - mG;
Substrate Concentration - 10 mM; Auxiliary Cascade Enzymes (AdoK/AcK) - SEQ ID NO: 1350 (10
μM), SEQ ID NO: 1354 (10 μM); Dilution into Coupling Reaction - 160X; Substrate
Oligonucleotides - SEQ ID NO: 1323, SEQ ID NO: 1324; Product Oligonucleotides - SEQ ID NO:
2659, SEQ ID NO: 2660.

[0780] Activity relative to SEQ ID NO: 2294 (Activity FIOP) was calculated based on the percentage of extension products observed for the variant compared with the percentage observed with SEQ ID NO: 2294 (where the percent product may be set as the average of replicates or else the highest single sample as appropriate). The results are shown in Table 36.2.

TABLE 36.2
Adenylate kinase activity relative to SEQ ID NO: 2294

| | | FIOP activity - |
|---|---|---|
| SEQ ID NO: | Amino Acid Differences | mG relative to |
| (nt/aa) | (Relative to SEQ ID NO: 2294) | SEQ ID NO: 2294 |
| 2367/2368 | A80P | +++ |
| 2369/2370 | R105K | ++++ |
| 2371/2372 | W228S | ++++ |
| 2373/2374 | D50Q | ++++ |
| 2375/2376 | L175F | ++++ |
| 2377/2378 | S170R | ++++ |
| 2379/2380 | V82L | +++ |
| 2381/2382 | Q173S | +++ |
| 2383/2384 | E65T | +++ |
| 2385/2386 | A53M | +++ |
| 2387/2388 | H184V | +++ |
| 2389/2390 | T122S | +++ |
| 2391/2392 | P195M | +++ |
| 2393/2394 | W228L | +++ |
| 2395/2396 | L68S | +++ |
| 2397/2398 | K89A | +++ |
| 2399/2400 | S34E | +++ |
| 2401/2402 | G118S | +++ |
| 2403/2404 | A53S | +++ |
| 2405/2406 | R119F | +++ |
| 2407/2408 | K87A | ++ |
| 2409/2410 | E179C | ++ |
| 2411/2412 | Q117S | ++ |
| 2413/2414 | F113E | ++ |
| 2415/2416 | D50C | ++ |
| 2417/2418 | A80G | ++ |
| 2419/2420 | T122H | ++ |
| 2421/2422 | K89V | ++ |
| 2423/2424 | A80R | ++ |
| 2425/2426 | K54I | ++ |
| 2427/2428 | R190Q | ++ |
| 2429/2430 | R216M | ++ |
| 2431/2432 | E88R | ++ |
| 2433/2434 | A80D | ++ |
| 2435/2436 | K36Q | ++ |
| 2437/2438 | R105S | ++ |
| 2439/2440 | P195G | ++ |
| 2441/2442 | L68V | ++ |
| 2443/2444 | R105L | ++ |
| 2445/2446 | L175D | + |
| 2447/2448 | H184T | + |
| 2449/2450 | D166L | + |
| 2451/2452 | K89H | + |
| 2453/2454 | G38R | + |
| 2455/2456 | K54G | + |
| 2457/2458 | G38F | + |
| 2459/2460 | K89I | + |
| 2461/2462 | V169I | + |
| 2463/2464 | W66C | + |
| 2465/2466 | R142W | + |
| 2467/2468 | Q117L | + |
| 2469/2470 | A136Y | + |
| 2471/2472 | E131V | + |
| 2473/2474 | K187Y | + |
| 2475/2476 | P40L | + |
| 2477/2478 | Q173T | + |
| 2479/2480 | P74C | + |
| 2481/2482 | W228V | + |
| 2483/2484 | I127L | + |
| 2485/2486 | A80L | + |
| 2487/2488 | Q55G | + |
| 2489/2490 | H184M | + |
| 2491/2492 | A136V | + |
| 2493/2494 | W228T | + |
| 2495/2496 | G148R | + |
| 2497/2498 | E88T | + |
| 2499/2500 | W228Q | + |
| 2501/2502 | W66S | + |
| 2503/2504 | I215V | + |
| 2505/2506 | P195R | + |
| 2507/2508 | R190G | + |
| 2509/2510 | K64R | + |
| 2511/2512 | H184R | + |
| 2513/2514 | T122A | + |
| 2515/2516 | D50S | + |
| 2517/2518 | R142M | + |
| 2519/2520 | F155W | + |
| 2521/2522 | A80S | + |
| 2523/2524 | R216G | + |

Levels of increased activity were determined FIOP activity - mG relative to SEQ ID NO: 2294 and are defined as follows: “+” > 1.3, “++” > 1.9, “+++” > 2.7, “++++” > 3.5.

### Example 37

### Improvements Over SEQ ID NO: 2294 in Conversion of Nucleoside Monophosphates to Nucleotides

### HTP Screening for Improved AdyK Variants

[0781] Adenylate kinase of SEQ ID NO: 2294 was selected as the parent adenylate kinase enzyme. Libraries of genes were produced from the parent gene using various techniques (e.g. saturation mutagenesis and recombination of previously identified beneficial mutations). The polypeptides encoded by each gene were produced in HTP and prepared as described in Table 37.1.

[0782] Reactions were performed as described in Example 4 using conditions summarized in Table 37.1. Data were collected using the TdT-coupled reaction and CE assay described in Example 6.

TABLE 37.1
Reaction conditions

Lysis Buffer - TEoA (pH 7.5), 0.1 g/L lysozyme; Lysis Conditions - 100 μL, 66° C., 60 min; Reaction
buffer - 50 mM Tris, 50 mM LiK(acetylphosphate), 10 μM ATP, 10 mM magnesium chloride, pH
8.0; Lysate concentration (vol %) - 5; Reaction Conditions - 1 μL, 30° C., 1 hr; Nucleoside substrate -
mU; Substrate Concentration - 10 mM; Auxiliary Cascade Enzymes (AdoK/AcK) - SEQ ID NO:
1352 (10 μM), SEQ ID NO: 1354 (10 μM); Dilution into Coupling Reaction - 800X; Substrate
Oligonucleotides - SEQ ID NO: 1323, SEQ ID NO: 1324; Product Oligonucleotides - SEQ ID NO:
1333, SEQ ID NO: 1334.

[0783] Stability relative to SEQ ID NO: 2294 (Stability FIOP) was calculated based on the percentage of extension products observed for the variant compared with the percentage observed with SEQ ID NO: 2294 (where the percent product may be set as the average of replicates or else the highest single sample as appropriate). The results are shown in Table 37.2.

TABLE 37.2
Adenylate kinase activity relative to SEQ ID NO: 2294

| | | FIOP stability |
|---|---|---|
| SEQ ID NO: | Amino Acid Differences | relative to |
| (nt/aa) | (Relative to SEQ ID NO: 2294) | SEQ ID NO: 2294 |
| 2371/2372 | W228S | + |
| 2375/2376 | L175F | + |
| 2383/2384 | E65T | + |
| 2385/2386 | A53M | + |
| 2407/2408 | K87A | + |
| 2419/2420 | T122H | + |
| 2421/2422 | K89V | + |
| 2445/2446 | L175D | + |
| 2461/2462 | V169I | + |
| 2507/2508 | R190G | + |
| 2509/2510 | K64R | + |
| 2511/2512 | H184R | + |
| 2525/2526 | S116A | +++ |
| 2527/2528 | D90C | +++ |
| 2529/2530 | D132K | +++ |
| 2531/2532 | R105G | +++ |
| 2533/2534 | A60W | +++ |
| 2535/2536 | G94Y | ++ |
| 2537/2538 | S112T | ++ |
| 2539/2540 | K87S | ++ |
| 2541/2542 | K187G | ++ |
| 2543/2544 | Q120T | ++ |
| 2545/2546 | K87I | ++ |
| 2547/2548 | L68R | ++ |
| 2549/2550 | T37Y | + |
| 2551/2552 | Q173R | + |
| 2553/2554 | R105M | + |
| 2555/2556 | E108V | + |
| 2557/2558 | A35L | + |
| 2559/2560 | L68I | + |
| 2561/2562 | D166F | + |
| 2563/2564 | A35F | + |
| 2565/2566 | Q120S | + |
| 2567/2568 | H184S | + |
| 2569/2570 | V169A | + |
| 2571/2572 | I51L | + |
| 2573/2574 | S61V | + |
| 2575/2576 | S116F | + |
| 2577/2578 | E65D | + |
| 2579/2580 | K54H | + |
| 2581/2582 | S212C | + |
| 2583/2584 | V172S | + |
| 2585/2586 | Q55L | + |
| 2587/2588 | V59L | + |
| 2589/2590 | A60C | + |
| 2591/2592 | W228F | + |
| 2593/2594 | N56Q | + |

Levels of increased activity were determined FIOP stability relative to SEQ ID NO: 2294 and are defined as follows: “+” > 1.07, “++” > 1.6, “+++” > 2.5.

### Example 38

### Improvements Over SEQ ID NO: 2368 in Conversion of Nucleoside Monophosphates to Nucleotides

### HTP Screening for Improved AdyK Variants

[0784] Adenylate kinase of SEQ ID NO: 2368 was selected as the parent adenylate kinase enzyme. Libraries of genes were produced from the parent gene using various techniques (e.g. saturation mutagenesis and recombination of previously identified beneficial mutations). The polypeptides encoded by each gene were produced in HTP and prepared as described in Table 38.1.

[0785] Reactions were performed as described in Example 4 using conditions summarized in Table 38.1. Data were collected using the TdT-coupled reaction and CE assay described in Example 6.

TABLE 38.1
Reaction conditions

Lysis Buffer - TEoA (pH 7.5), 0.1 g/L lysozyme; Lysis Conditions - 100 μL, 50° C., 60 min; Reaction
buffer - 50 mM Tris, 50 mM LiK(acetylphosphate), 10 μM ATP, 10 mM magnesium chloride, pH 8.0;
Lysate concentration (vol %) - 5; Reaction Conditions - 1 μL, 30° C., 1 hr; Nucleoside substrate - mU;
Substrate Concentration - 10 mM; Auxiliary Cascade Enzymes (AdoK/AcK) - SEQ ID NO: 1352 (10
μM), SEQ ID NO: 1354 (10 μM); Dilution into Coupling Reaction - 800X; Substrate Oligonucleotides -
SEQ ID NO: 1323, SEQ ID NO: 1324; Product Oligonucleotides - SEQ ID NO: 1333, SEQ ID NO: 1334.

[0786] Activity relative to SEQ ID NO: 2368 (Activity FIOP) was calculated based on the percentage of extension products observed for the variant compared with the percentage observed with SEQ ID NO: 2368 (where the percent product may be set as the average of replicates or else the highest single sample as appropriate). The results are shown in Table 38.2.

TABLE 38.2
Adenylate kinase activity relative to SEQ ID NO: 2368

| | | FIOP activity - |
|---|---|---|
| SEQ ID NO: | Amino Acid Differences | mG relative to |
| (nt/aa) | (Relative to SEQ ID NO: 2368) | SEQ ID NO: 2368 |
| 2595/2596 | A136Y/W228V | +++ |
| 2597/2598 | V82L/R142M/Q173T/H184T/R216M | +++ |
| 2599/2600 | H184T/R216M | +++ |
| 2601/2602 | D50Q/H184M/R216M | +++ |
| 2603/2604 | I127L/Q173R/H184M | +++ |
| 2605/2606 | R105K/A136V/S170R/L175F/W228T | ++ |
| 2607/2608 | R105K/L175F | ++ |
| 2609/2610 | I127L/Q173T/H184M | ++ |
| 2611/2612 | D50Q/H184T | ++ |
| 2613/2614 | R105K/S170R/L175F/W228V | ++ |
| 2615/2616 | D50Q/I127L/Q173R/H184M | ++ |
| 2617/2618 | D50Q/R142M/H184M/R216M | ++ |
| 2619/2620 | D50Q/V82L/I127L/R216M | ++ |
| 2621/2622 | D50Q | + |
| 2623/2624 | D50Q/V82L/Q173T/R216M | + |
| 2625/2626 | D50Q/I127L/R142W/H184M/R216M | + |
| 2627/2628 | D50Q/V82L/I127L | + |
| 2629/2630 | A136V/W228V | + |
| 2631/2632 | R105K/A136V | + |
| 2633/2634 | R105K/W228V | + |
| 2635/2636 | R105K/A136V/L175F/W228V | + |
| 2637/2638 | Q173T/R216M | + |
| 2639/2640 | D50Q/Q173T | + |
| 2641/2642 | W228V | + |
| 2643/2644 | I127L/Q173R | + |
| 2645/2646 | R105K/A136V/S170R/P195G | + |
| 2647/2648 | D50Q/V82L/R216M | + |
| 2649/2650 | L175F/W228V | + |
| 2651/2652 | D50Q/V82L/I127L/R142M/ | + |
| | H184M/R216M | |

Levels of increased activity were determined FIOP activity - mG relative to SEQ ID NO: 2368 and are defined as follows: “+” > 1.2, “++” > 1.4, “+++” > 1.7.

### Example 39

### Biosynthetic Cascade Reactions for Production of Nucleotide Triphosphates (NTPs) Using Pyruvate Oxidase (POx)

### NTP Biosynthetic Reaction Setup

[0787] Reactions were performed in 384-well format 40 μL BioRad PCR plates. AdoK variants were assayed in the presence of adenylate kinase (AdoK), acetate kinase (AcK), and pyruvate oxidase (POx) variants to enable direct conversion of nucleosides to the corresponding triphosphate using potassium phosphate and sodium pyruvate as POx substrates. These enzyme were added as either purified enzymes at a specific molarity or as g/L lyophilized lysate powder which was prepared by lyophilizing clarified shake flask lysate prepared as in Example 3. The reactions were set up as follows: (i) all reaction components, except for the nucleoside substrate, pyruvate, phosphate and the AdoK lysate, were premixed in a single solution and were aliquoted into each well of the 384-well plates, (ii) AdoK lysate solution was then added into the wells, and (iii) an aliquot of the substrate nucleoside in DMSO and with an aliquot of equimolar sodium pyruvate and potassium phosphate was added to initiate the reaction. The reaction plate was heat-sealed with a peelable aluminum seal and incubated in a thermocycler at the indicated temperature and reaction time, then held at 10° C. prior to analysis.

### Example 40

### Improvements Over SEQ ID NO: 2368 in Conversion of Nucleoside Monophosphates to Nucleotides

### HTP Screening for Improved AdvK Variants

[0788] Adenylate kinase of SEQ ID NO: 2368 was selected as the parent adenylate kinase enzyme. Libraries of genes were produced from the parent gene using various techniques (e.g. saturation mutagenesis and recombination of previously identified beneficial mutations). The polypeptides encoded by each gene were produced in HTP and prepared as described in Table 40.1.

[0789] Reactions were performed as described in Example 39 using conditions summarized in Table 40.1. Data were collected using the CE assay described in Example 6.

TABLE 40.1
Reaction conditions

Lysis Buffer - TEoA (pH 7.5), 0.1 g/L lysozyme; Lysis Conditions - 100 μL, 50.0° C., 60 min;
Reaction buffer - 50.0 mM Tris, 50.0 mM sodium pyruvate, 50.0 mM dibasic potassium phosphate,
10.0 μM ATP, 10 mM magnesium chloride, pH 8.0; Lysate concentration (vol %) - 10.0; Reaction
Conditions - 1.0 μL, 30.0° C., 2 hr; Nucleoside substrate - fG; Substrate Concentration - 10.0 mM;
Auxiliary Cascade Enzymes - SEQ ID NO: 1352 (10.0 μM), SEQ ID NO: 1354 (10.0 μM), SEQ ID
NO: 2670 (2.0 μM); Dilution into Coupling Reaction - 800X; Substrate Oligonucleotides - SEQ ID
NO: 3194, SEQ ID NO: 3193; Product Oligonucleotides - SEQ ID NO: 3196, SEQ ID NO: 3195.

[0790] Activity relative to SEQ ID NO: 2368 (Activity FIOP) was calculated based on the percentage of extension products observed for the variant compared with the percentage observed with SEQ ID NO: 2368 (where the percent product may be set as the average of replicates or else the highest single sample as appropriate). The results are shown in Table 40.2.

TABLE 40.2
Adenylate kinase activity relative to SEQ ID NO: 2368

| | | FIOP % yield fGTP |
|---|---|---|
| SEQ ID NO: | Amino Acid Differences | relative to |
| (nt/aa) | (Relative to SEQ ID NO: 2368) | SEQ ID NO: 2368 |
| 2675/2676 | L48F | +++ |
| 2677/2678 | L138V | +++ |
| 2679/2680 | P21V | +++ |
| 2681/2682 | P21L | +++ |
| 2683/2684 | S43G | ++ |
| 2685/2686 | D46E | ++ |
| 2687/2688 | P22A | ++ |
| 2689/2690 | T181C | ++ |
| 2691/2692 | V182A | ++ |
| 2693/2694 | L138M | ++ |
| 2695/2696 | T44S | ++ |
| 2697/2698 | T181V | + |
| 2699/2700 | D46M | + |
| 2701/2702 | D46L | + |
| 2703/2704 | P21N | + |
| 2705/2706 | G20A | + |
| 2707/2708 | S43A | + |
| 2709/2710 | S43H | + |
| 2711/2712 | D46Y | + |
| 2713/2714 | D46F | + |

Levels of increased activity were determined for FIOP % yield fGTP relative to SEQ ID NO: 2368 and are defined as follows: “+” > 1.1, “++”> 1.3, “+++” > 1.5.

### Example 41

### Improvements Over SEQ ID NO: 2602 in Conversion of Nucleoside Monophosphates to Nucleotides

### HTP Screening for Improved AdyK Variants

[0791] Adenylate kinase of SEQ ID NO: 2602 was selected as the parent adenylate kinase enzyme. Libraries of genes were produced from the parent gene using various techniques (e.g. saturation mutagenesis and recombination of previously identified beneficial mutations). The polypeptides encoded by each gene were produced in HTP and prepared as described in Table 41.1.

[0792] Reactions were performed as described in Example 39 using conditions summarized in Table 41.1. Data were collected using the CE assay described in Example 6.

TABLE 41.1
Reaction conditions

Lysis Buffer - TEoA (pH 7.5), 0.1 g/L lysozyme; Lysis Conditions - 100 μL, 50.0° C., 60 min;
Reaction buffer - 50.0 mM Tris, 50.0 mM sodium pyruvate, 50.0 mM dibasic potassium phosphate,
10.0 μM ATP, 10 mM magnesium chloride, pH 8.0; Lysate concentration (vol %) - 5; Reaction
Conditions - 1.0 μL, 30.0° C., 1.0 hr; Nucleoside substrate - mU; Substrate Concentration - 10.0
mM; Auxiliary Cascade Enzymes - SEQ ID NO: 1352 (10.0 μM), SEQ ID NO: 1354 (10.0 μM),
SEQ ID NO: 2670 (2.0 μM); Dilution into Coupling Reaction - 800X; Substrate Oligonucleotides -
SEQ ID NO: 3194, SEQ ID NO: 3193; Product Oligonucleotides - SEQ ID NO: 3198, SEQ ID NO:
3197.

[0793] Activity relative to SEQ ID NO: 2602 (Activity FIOP) was calculated based on the percentage of extension products observed for the variant compared with the percentage observed with SEQ ID NO: 2602 (where the percent product may be set as the average of replicates or else the highest single sample as appropriate). The results are shown in Table 41.2.

TABLE 41.2
Adenylate kinase activity relative to SEQ ID NO: 2602

| | | FIOP % yield mUTP |
|---|---|---|
| SEQ ID NO: | Amino Acid Differences | relative to |
| (nt/aa) | (Relative to SEQ ID NO: 2602) | SEQ ID NO: 2602 |
| 2715/2716 | M216P | +++ |
| 2717/2718 | Q50R | +++ |
| 2719/2720 | P21T | +++ |
| 2721/2722 | Q173F | +++ |
| 2723/2724 | G20R | +++ |
| 2725/2726 | L156A | ++ |
| 2727/2728 | M216L | ++ |
| 2729/2730 | K69F | ++ |
| 2731/2732 | S43N | ++ |
| 2733/2734 | G148P | ++ |
| 2735/2736 | G30L | ++ |
| 2737/2738 | R149L | ++ |
| 2739/2740 | P21R | ++ |
| 2741/2742 | V143T | ++ |
| 2743/2744 | P21L | ++ |
| 2745/2746 | M216W | ++ |
| 2747/2748 | M153V | ++ |
| 2749/2750 | G20P | ++ |
| 2751/2752 | M216G | ++ |
| 2753/2754 | I42T | ++ |
| 2755/2756 | D98G | ++ |
| 2757/2758 | G30Y | ++ |
| 2759/2760 | W66P | + |
| 2761/2762 | G99C | + |
| 2763/2764 | G99A | + |
| 2765/2766 | M216D | + |
| 2767/2768 | D98Q | + |
| 2769/2770 | R102C | + |
| 2771/2772 | P80S | + |
| 2773/2774 | M216N | + |
| 2775/2776 | G27C | + |
| 2777/2778 | G148S | + |
| 2779/2780 | R102N | + |
| 2781/2782 | M67R | + |
| 2783/2784 | P80G | + |
| 2785/2786 | L18E | + |
| 2787/2788 | L18C/N56T | + |
| 2789/2790 | L139H | + |
| 2791/2792 | G70R | + |
| 2793/2794 | M216E | + |
| 2795/2796 | M184N | + |
| 2797/2798 | R142L | + |
| 2799/2800 | K26L | + |
| 2801/2802 | I32L | + |
| 2803/2804 | D98A | + |
| 2805/2806 | N152F | + |
| 2807/2808 | G30S | + |
| 2809/2810 | R141V | + |
| 2811/2812 | G20T | + |
| 2813/2814 | R102A | + |
| 2815/2816 | G20V | + |
| 2817/2818 | V135I | + |
| 2819/2820 | R141G | + |
| 2821/2822 | R137L | + |
| 2823/2824 | Q29R | + |

Levels of increased activity were determined for FIOP % yield fGTP relative to SEQ ID NO: 2368 and are defined as follows: “+” > 1.1, “++” > 1.3, “+++” > 1.5.

### Example 42

### Improvements Over SEQ ID NO: 2602 in Conversion of Nucleoside Monophosphates to Nucleotides

### HTP Screening for Improved AdyK Variants

[0794] Adenylate kinase of SEQ ID NO: 2602 was selected as the parent adenylate kinase enzyme. Libraries of genes were produced from the parent gene using various techniques (e.g. saturation mutagenesis and recombination of previously identified beneficial mutations). The polypeptides encoded by each gene were produced in HTP and prepared as described in Table 42.1.

[0795] Reactions were performed as described in Example 39 using conditions summarized in Table 42.1. Data were collected using the CE assay described in Example 6.

TABLE 42.1
Reaction conditions

Lysis Buffer - TEoA (pH 7.5), 0.1 g/L lysozyme; Lysis Conditions - 100 μL, 50.0° C., 60 min;
Reaction buffer - 50.0 mM Tris, 50.0 mM sodium pyruvate, 50.0 mM dibasic potassium phosphate,
10.0 μM ATP, 10 mM magnesium chloride, pH 8.0; Lysate concentration (vol %) - 10.0; Reaction
Conditions - 1.0 μL, 30.0° C., 1.0 hr; Nucleoside substrate - mG or mU; Substrate Concentration -
10.0 mM; Auxiliary Cascade Enzymes - SEQ ID NO: 1352 (10.0 μM), SEQ ID NO: 1354 (10.0
μM), SEQ ID NO: 2670 (2.0 μM); Dilution into Coupling Reaction - 200X; Substrate
Oligonucleotides - SEQ ID NO: 3194, SEQ ID NO: 3193; Product Oligonucleotides - SEQ ID NO:
3200, SEQ ID NO: 3199 or SEQ ID NO: 3198, SEQ ID NO: 3197.

[0796] Activity relative to SEQ ID NO: 2602 (Activity FIOP) was calculated based on the percentage of extension products observed for the variant compared with the percentage observed with SEQ ID NO: 2602 (where the percent product may be set as the average of replicates or else the highest single sample as appropriate). The results are shown in Table 42.2.

TABLE 42.2
Adenylate kinase activity relative to SEQ ID NO: 2602

| | | FIOP % yield | FIOP % yield |
|---|---|---|---|
| | | mUTP relative | mGTP relative |
| SEQ ID | Amino Acid Differences | to SEQ ID | to SEQ ID NO: |
| NO: (nt/aa) | (Relative to SEQ ID NO: 2602) | NO: 2602 | 2602 |
| 2825/2826 | R105K/I127L/A136V/P195G | + | +++ |
| 2827/2828 | E65T/R105K/I127L/L175F | | +++ |
| 2829/2830 | E65T/I127L/S170R | ++ | +++ |
| 2831/2832 | V104A/I127L/A136V/L175F | + | ++ |
| 2833/2834 | E65T/V104A/A136V | | ++ |
| 2835/2836 | E65T/R105K/I127L/A136V | + | ++ |
| 2837/2838 | V104A/R105K/I127L/A136V/L175F/P195G | ++ | ++ |
| 2839/2840 | E65T/V104A/A136V/S170R | | ++ |
| 2841/2842 | R105K/S116A/I127L/A136Y/S170R/L175F | + | + |
| 2843/2844 | E65T | | + |
| 2845/2846 | E65T/R105K/I127L/S170R | | + |
| 2847/2848 | E65T/R105K/A136V | + | + |
| 2849/2850 | E65T/V104A/R105K/S116A/I127L | | + |
| 2851/2852 | R105K | | + |
| 2853/2854 | E65T/V104A/R105K/I127L/A136V | | + |
| 2855/2856 | V104A/I127L/A136V/S170R | | + |
| 2857/2858 | V104A/R105K/A136V/S170R | +++ | |
| 2859/2860 | D132K | +++ | |
| 2861/2862 | E65T/V104A | +++ | |
| 2863/2864 | R105K/A136V/P195G | +++ | |
| 2865/2866 | V104A/I127L | ++ | |
| 2867/2868 | E65T/S116A | ++ | |
| 2869/2870 | I127L/P195G | ++ | |
| 2871/2872 | R105K/A136V | ++ | |
| 2873/2874 | S116A/I127L/A136Y/L175F | ++ | |
| 2875/2876 | E65T/I127L/A136V/S170R | ++ | |
| 2877/2878 | E65T/R105K/S116A/A136V/S170R | ++ | |
| 2879/2880 | E65T/I127L/A136Y | ++ | |
| 2881/2882 | S170R | + | |
| 2883/2884 | E65T/R105K/I127L/A136V/L175F | + | |
| 2885/2886 | E65T/R105K/A136V/S170R | + | |
| 2887/2888 | V104A/R105K | + | |
| 2889/2890 | A136V | + | |
| 2891/2892 | R105K/I127L/A136V | + | |
| 2893/2894 | E65T/R105K/S170R | + | |
| 2895/2896 | G94Y/Q173R | + | |
| 2897/2898 | V104A/R105K/I127L | + | |
| 2899/2900 | G94Y/K187G | + | |

Levels of increased activity were determined for FIOP % yield mUTP relative to SEQ ID NO: 2602 and are defined as follows: “+” > 2.7, “++” > 4.5, “+++” > 7.0. Levels of increased activity were determined for FIOP % yield mGTP relative to SEQ ID NO: 2602 and are defined as follows: “+” > 2.0, “++” > 3.0, “+++” > 4.5.

### Example 43

### Improvements Over SEQ ID NO: 2602 in Conversion of Nucleoside Monophosphates to Nucleotides

### HTP Screening for Improved AdyK Variants

[0797] Adenylate kinase of SEQ ID NO: 2602 was selected as the parent adenylate kinase enzyme. Libraries of genes were produced from the parent gene using various techniques (e.g. saturation mutagenesis and recombination of previously identified beneficial mutations). The polypeptides encoded by each gene were produced in HTP and prepared as described in Table 43.1.

[0798] Reactions were performed as described in Example 39 using conditions summarized in Table 43.1. Data were collected using the CE assay described in Example 6.

TABLE 43.1
Reaction conditions

Lysis Buffer - TEoA (pH 7.5), 0.1 g/L lysozyme; Lysis Conditions - 100 μL, 50.0° C., 60 min;
Reaction buffer - 50.0 mM Tris, 50.0 mM sodium pyruvate, 50.0 mM dibasic potassium phosphate,
10.0 μM ATP, 10 mM magnesium chloride, pH 8.0; Lysate concentration (vol %) - 2.5; Reaction
Conditions - 1.0 μL, 30.0° C., 1.0 hr; Nucleoside substrate - mU; Substrate Concentration - 10.0
mM; Auxiliary Cascade Enzymes - SEQ ID NO: 2662 (10.0 μM), SEQ ID NO: 1354 (10.0 μM),
SEQ ID NO: 2672 (2.0 μM); Dilution into Coupling Reaction - 800X; Substrate Oligonucleotides -
SEQ ID NO: 3194, SEQ ID NO: 3193; Product Oligonucleotides - SEQ ID NO: 3198, SEQ ID NO:
3197.

[0799] Activity relative to SEQ ID NO: 2602 (Activity FIOP) was calculated based on the percentage of extension products observed for the variant compared with the percentage observed with SEQ ID NO: 2602 (where the percent product may be set as the average of replicates or else the highest single sample as appropriate). The results are shown in Table 43.2.

TABLE 43.2
Adenylate kinase activity relative to SEQ ID NO: 2602

| | | FIOP % yield UTP |
|---|---|---|
| SEQ ID NO: | Amino Acid Differences | relative to |
| (nt/aa) | (Relative to SEQ ID NO: 2602) | SEQ ID NO: 2602 |
| 2901/2902 | T37L | ++ |
| 2903/2904 | T37I | ++ |
| 2905/2906 | Q117L | ++ |
| 2907/2908 | V59Y | ++ |
| 2909/2910 | K89P | ++ |
| 2911/2912 | P40S | + |
| 2913/2914 | Q50A | + |
| 2915/2916 | V59T | + |
| 2917/2918 | Q120L | + |
| 2919/2920 | K36V | + |
| 2921/2922 | E128I | + |
| 2923/2924 | G168L | + |
| 2925/2926 | K203L | + |

Levels of increased activity were determined for FIOP % yield UTP relative to SEQ ID NO: 2602 and are defined as follows: “+” > 1.1, “++” > 1.25.

### Example 44

### Improvements Over SEQ ID NO: 2602 in Conversion of Nucleoside Monophosphates to Nucleotides

### HTP Screening for Improved AdyK Variants

[0800] Adenylate kinase of SEQ ID NO: 2602 was selected as the parent adenylate kinase enzyme. Libraries of genes were produced from the parent gene using various techniques (e.g. saturation mutagenesis and recombination of previously identified beneficial mutations). The polypeptides encoded by each gene were produced in HTP and prepared as described in Table 44.1.

[0801] Reactions were performed as described in Example 39 using conditions summarized in Table 44.1. Data were collected using the CE assay described in Example 6.

TABLE 44.1
Reaction conditions

Lysis Buffer - TEoA (pH 7.5), 0.1 g/L lysozyme; Lysis Conditions - 100 μL, 50.0° C., 60 min;
Reaction buffer - 50.0 mM Tris, 50.0 mM sodium pyruvate, 50.0 mM dibasic potassium phosphate,
10.0 μM ATP, 10 mM magnesium chloride, pH 8.0; Lysate concentration (vol %) - 1; Reaction
Conditions - 1.0 μL, 30.0° C., 1.0 hr; Nucleoside substrate - fG; Substrate Concentration - 10.0 mM;
Auxiliary Cascade Enzymes - SEQ ID NO: 2662 (10.0 μM), SEQ ID NO: 1354 (10.0 μM), SEQ ID
NO: 2672 (2.0 μM); Dilution into Coupling Reaction - 800X; Substrate Oligonucleotides - SEQ ID
NO: 3194, SEQ ID NO: 3193; Product Oligonucleotides - SEQ ID NO: 3196, SEQ ID NO: 3195.

[0802] Stability relative to SEQ ID NO: 2602 (Stability FIOP) was calculated based on the percentage of extension products observed for the variant compared with the percentage observed with SEQ ID NO: 2602 (where the percent product may be set as the average of replicates or else the highest single sample as appropriate). The results are shown in Table 44.2.

TABLE 44.2
Adenylate kinase stability relative to SEQ ID NO: 2602

| | | FIOP stability |
|---|---|---|
| SEQ ID NO: | Amino Acid Differences | relative to |
| (nt/aa) | (Relative to SEQ ID NO: 2602) | SEQ ID NO: 2602 |
| 2927/2928 | D90S | +++ |
| 2929/2930 | I32F | +++ |
| 2931/2932 | S61E | +++ |
| 2933/2934 | K36S | ++ |
| 2935/2936 | S61N | ++ |
| 2937/2938 | S170G | ++ |
| 2939/2940 | V172A | ++ |
| 2941/2942 | D166S | ++ |
| 2943/2944 | E128R | ++ |
| 2945/2946 | E58Y | ++ |
| 2947/2948 | E128C | ++ |
| 2949/2950 | G94M | + |
| 2951/2952 | E131G | + |
| 2953/2954 | D111R | + |
| 2955/2956 | Q50N | + |
| 2957/2958 | D111P | + |
| 2959/2960 | Q50V | + |
| 2961/2962 | V104R | + |
| 2963/2964 | P195I | + |
| 2965/2966 | T37F | + |
| 2967/2968 | R119P | + |
| 2969/2970 | G94V | + |
| 2971/2972 | D166L | + |
| 2973/2974 | V169Y | + |
| 2975/2976 | D132L | + |
| 2977/2978 | K192H | + |
| 2979/2980 | L97I | + |
| 2981/2982 | K89L | + |
| 2983/2984 | Y200A | + |
| 2985/2986 | L110F | + |
| 2987/2988 | G118L | + |

Levels of increased activity were determined for FIOP stability relative to SEQ ID NO: 2602 and are defined as follows: “+” > 1.6, “++” > 2.2, “+++” > 3.0.

### Example 45

### Improvements Over SEQ ID NO: 2832 in Conversion of Nucleoside Monophosphates to Nucleotides

### HTP Screening for Improved AdyK Variants

[0803] Adenylate kinase of SEQ ID NO: 2832 was selected as the parent adenylate kinase enzyme. Libraries of genes were produced from the parent gene using various techniques (e.g. saturation mutagenesis and recombination of previously identified beneficial mutations). The polypeptides encoded by each gene were produced in HTP and prepared as described in Table 45.1.

[0804] Reactions were performed as described in Example 39 using conditions summarized in Table 45.1. Data were collected using the CE assay described in Example 6.

TABLE 45.1
Reaction conditions

Lysis Buffer - TEoA (pH 7.5), 0.1 g/L lysozyme; Lysis Conditions - 100 μL, 66° C., 60 min; Reaction
buffer - 50.0 mM Tris, 50.0 mM sodium pyruvate, 50.0 mM dibasic potassium phosphate, 10.0 μM
ATP, 10 mM magnesium chloride, pH 8.0; Lysate concentration (vol %) - 5; Reaction Conditions -
1.0 μL, 30.0° C., 16 hr; Nucleoside substrate - fG; Substrate Concentration - 10.0 mM; Auxiliary
Cascade Enzymes - SEQ ID NO: 2662 (10.0 μM), SEQ ID NO: 1354 (10.0 μM), SEQ ID NO: 2672
(2.0 μM); Dilution into Coupling Reaction - 800X; Substrate Oligonucleotides - SEQ ID NO: 3194,
SEQ ID NO: 3193; Product Oligonucleotides - SEQ ID NO: 3196, SEQ ID NO: 3195.

[0805] Stability relative to SEQ ID NO: 2832 (Stability FIOP) was calculated based on the percentage of extension products observed for the variant compared with the percentage observed with SEQ ID NO: 2832 (where the percent product may be set as the average of replicates or else the highest single sample as appropriate). The results are shown in Table 45.2.

TABLE 45.2
Adenylate kinase activity relative to SEQ ID NO: 2832

| | | FIOP stability |
|---|---|---|
| SEQ ID NO: | Amino Acid Differences | relative to |
| (nt/aa) | (Relative to SEQ ID NO: 2832) | SEQ ID NO: 2832 |
| 2989/2990 | Q50N | +++ |
| 2991/2992 | K36S | +++ |
| 2993/2994 | Y151F/P157V | ++ |
| 2995/2996 | M216D | ++ |
| 2997/2998 | Q50N/K93V | ++ |
| 2999/3000 | D90S/A104R | ++ |
| 3001/3002 | K36S/Q50N/K89L/K93V/L139R | ++ |
| 3003/3004 | K36S/Q50N/K89L/K93V/L110F | ++ |
| 3005/3006 | K36S/Q50N | ++ |
| 3007/3008 | A104R/Y151F/I154Q | + |
| 3009/3010 | Q50N/K89L/K93V/L139R | + |
| 3011/3012 | K36S/Q50N/K89L/L139R/S170G | + |
| 3013/3014 | K36S/Q50N/K89L/V172A | + |
| 3015/3016 | A104R/Y151F/I154Q/P157V | + |
| 3017/3018 | Y151F/M216E | + |
| 3019/3020 | K36S/K89L | + |
| 3021/3022 | Q50N/K89L/K93V | + |
| 3023/3024 | Q50N/S170G | + |
| 3025/3026 | A104R/I154Q/P157V/M216E | + |
| 3027/3028 | K36S/S170G | + |
| 3029/3030 | D90S/Y151F/P157V | + |
| 3031/3032 | K89L/S170G/V172A | + |

Levels of increased activity were determined for FIOP stability relative to SEQ ID NO: 2832 and are defined as follows: “+” > 1.1, “++” > 1.3, “+++” > 1.5.

### Example 46

### Improvements Over SEQ ID NO: 2994 in Conversion of Nucleoside Monophosphates to Nucleotides

### HTP Screening for Improved AdyK Variants

[0806] Adenylate kinase of SEQ ID NO: 2994 was selected as the parent adenylate kinase enzyme. Libraries of genes were produced from the parent gene using various techniques (e.g. saturation mutagenesis and recombination of previously identified beneficial mutations). The polypeptides encoded by each gene were produced in HTP and prepared as described in Table 46.1.

[0807] Reactions were performed as described in Example 39 using conditions summarized in Table 46.1. Data were collected using the CE assay described in Example 6.

TABLE 46.1
Reaction conditions

Lysis Buffer - TEoA (pH 7.5), 0.1 g/L lysozyme; Lysis Conditions - 100 μL, 50.0° C., 60 min;
Reaction buffer - 50.0 mM Tris, 50.0 mM sodium pyruvate, 50.0 mM dibasic potassium phosphate,
10.0 μM ATP, 10 mM magnesium chloride, pH 8.0; Lysate concentration (vol %) - 10.0; Reaction
Conditions - 1.0 μL, 30.0° C., 1.0 hr; Nucleoside substrate - fG; Substrate Concentration - 10.0 mM;
Auxiliary Cascade Enzymes - SEQ ID NO: 2664 (10.0 μM), SEQ ID NO: 2668 (10.0 μM), SEQ ID
NO: 2672 (2.0 μM); Dilution into Coupling Reaction - 800X; Substrate Oligonucleotides - SEQ ID
NO: 3194, SEQ ID NO: 3193; Product Oligonucleotides - SEQ ID NO: 3196, SEQ ID NO: 3195.

[0808] Activity relative to SEQ ID NO: 2994 (Activity FIOP) was calculated based on the percentage of extension products observed for the variant compared with the percentage observed with SEQ ID NO: 2994 (where the percent product may be set as the average of replicates or else the highest single sample as appropriate). The results are shown in Table 46.2.

TABLE 46.2
adenylate kinase activity relative to SEQ ID NO: 2994

| | | FIOP % yield fGTP |
|---|---|---|
| SEQ ID NO: | Amino Acid Differences | relative to |
| (nt/aa) | (Relative to SEQ ID NO: 2994) | SEQ ID NO: 2994 |
| 3033/3034 | L226R | +++ |
| 3035/3036 | P80W | +++ |
| 3037/3038 | P217T | +++ |
| 3039/3040 | S170P | ++ |
| 3041/3042 | N79P | ++ |
| 3043/3044 | N79K | ++ |
| 3045/3046 | S170R | ++ |
| 3047/3048 | G224S | ++ |
| 3049/3050 | G224T | ++ |
| 3051/3052 | E76G | ++ |
| 3053/3054 | N79A | ++ |
| 3055/3056 | S112C | ++ |
| 3057/3058 | V172M | ++ |
| 3059/3060 | L68A | ++ |
| 3061/3062 | V182G | ++ |
| 3063/3064 | W228D | ++ |
| 3065/3066 | P74Q | + |
| 3067/3068 | S170H | + |
| 3069/3070 | L226K | + |
| 3071/3072 | V59W | + |
| 3073/3074 | F113W | + |
| 3075/3076 | R119S | + |
| 3077/3078 | V182L | + |
| 3079/3080 | N79L | + |
| 3081/3082 | Q50L | + |
| 3083/3084 | E76L | + |
| 3085/3086 | N79W | + |
| 3087/3088 | V182Q | + |
| 3089/3090 | D90K | + |
| 3091/3092 | D230M | + |
| 3093/3094 | E58C | + |
| 3095/3096 | K231R | + |
| 3097/3098 | L68E | + |
| 3099/3100 | L68V | + |
| 3101/3102 | M184R | + |

Levels of increased activity were determined for FIOP activity relative to SEQ ID NO: 2994 and are defined as follows: “+” > 2.5, “++” > 3.0, “+++” > 4.0.

### Example 47

### Improvements Over SEQ ID NO: 2994 in Conversion of Nucleoside Monophosphates to Nucleotides

### HTP Screening for Improved AdyK Variants

[0809] Adenylate kinase of SEQ ID NO: 2994 was selected as the parent adenylate kinase enzyme. Libraries of genes were produced from the parent gene using various techniques (e.g. saturation mutagenesis and recombination of previously identified beneficial mutations). The polypeptides encoded by each gene were produced in HTP and prepared as described in Table 47.1.

[0810] Reactions were performed as described in Example 39 using conditions summarized in Table 47.1. Data were collected using the CE assay described in Example 6.

TABLE 47.1
Reaction conditions

Lysis Buffer - TEoA (pH 7.5), 0.1 g/L lysozyme; Lysis Conditions - 100 μL, 50.0° C., 60 min; Reaction
buffer - 50.0 mM Tris, 50.0 mM sodium pyruvate, 50.0 mM dibasic potassium phosphate, 10.0 μM
ATP, 10 mM magnesium chloride, pH 8.0; Lysate concentration (vol %) - 10.0; Reaction Conditions -
1.0 μL, 30.0° C., 1.0 hr; Nucleoside substrate - mG; Substrate Concentration - 10.0 mM; Auxiliary
Cascade Enzymes - SEQ ID NO: 2666 (10.0 μM), SEQ ID NO: 2668 (10.0 μM), SEQ ID NO: 2672
(2.0 μM); Dilution into Coupling Reaction - 800X; Substrate Oligonucleotides - SEQ ID NO: 3194,
SEQ ID NO: 3193; Product Oligonucleotides - SEQ ID NO: 3200, SEQ ID NO: 3199.

[0811] Activity relative to SEQ ID NO: 2994 (Activity FIOP) was calculated based on the percentage of extension products observed for the variant compared with the percentage observed with SEQ ID NO: 2994 (where the percent product may be set as the average of replicates or else the highest single sample as appropriate). The results are shown in Table 47.2.

TABLE 47.2
adenylate kinase activity relative to SEQ ID NO: 2994

| | | FIOP % yield mGTP |
|---|---|---|
| SEQ ID NO: | Amino Acid Differences | relative to |
| (nt/aa) | (Relative to SEQ ID NO: 2994) | SEQ ID NO: 2994 |
| 3103/3104 | K83L/R190Q/S201A/M216E | +++ |
| 3105/3106 | K83L/M216E | +++ |
| 3107/3108 | N79W/W228V | ++ |
| 3109/3110 | V157P/R190Q/M216E | ++ |
| 3111/3112 | K83L/A104R/F151Y/G168S/ | ++ |
| | Q173T/R190Q | |
| 3113/3114 | K83L | ++ |
| 3115/3116 | S229I | ++ |
| 3117/3118 | A104R/V157P | ++ |
| 3119/3120 | V157P/R190Q | ++ |
| 3121/3122 | V157P/W228V | + |
| 3123/3124 | V157P/Q173T/R190Q/M216E | + |
| 3125/3126 | K83L/Q173V/R190Q | + |
| 3127/3128 | K83L/Q173T/S201A | + |
| 3129/3130 | N79W/V157P/W228V/S229I | + |
| 3131/3132 | K83L/F113Y | + |
| 3133/3134 | S201F/M216E | + |
| 3135/3136 | K83L/A104R | + |
| 3137/3138 | N79W/V157P/S229I | + |
| 3139/3140 | V157P | + |
| 3141/3142 | Q173T/M216E | + |
| 3143/3144 | K83L/Q173V/R190Q/S201F | + |
| 3145/3146 | V157P/R183L | + |
| 3147/3148 | K83L/R190Q | + |
| 3149/3150 | N79W/A104R/V157P/W228V | + |

Levels of increased activity were determined for FIOP % yield mGTP relative to SEQ ID NO: 2994 and are defined as follows: “+” > 2.5, “++” > 4.0, “+++” > 6.5.

### Example 48

### Improvements Over SEQ ID NO: 3104 in Conversion of Nucleoside Monophosphates to Nucleotides

### HTP Screening for Improved AdyK Variants

[0812] Adenylate kinase of SEQ ID NO: 3104 was selected as the parent adenylate kinase enzyme. Libraries of genes were produced from the parent gene using various techniques (e.g. saturation mutagenesis and recombination of previously identified beneficial mutations). The polypeptides encoded by each gene were produced in HTP and prepared as described in Table 48.1.

[0813] Reactions were performed as described in Example 39 using conditions summarized in Table 48.1. Data were collected using the CE assay described in Example 6.

TABLE 48.1
Reaction conditions

Lysis Buffer - TEoA (pH 7.5), 0.1 g/L lysozyme; Lysis Conditions - 100 μL, 55° C., 60 min;
Reaction buffer - 50 mM Tris, 50 mM sodium pyruvate, 50 mM dibasic potassium phosphate, 10
uM ATP, 10 mM magnesium chloride, pH 8.0; Lysate concentration (vol %) - 10; Reaction
Conditions - 1 μL, 30° C., 16 hr; Nucleoside substrate - mU; Substrate Concentration - 10 mM;
Auxiliary Cascade Enzymes - SEQ ID NO: 2666 (10 μM), SEQ ID NO: 2668 (0.25 g/L lyophilized
lysate), SEQ ID NO: 2674 (0.25 μM); Dilution into Coupling Reaction - 800X; Substrate
Oligonucleotides - SEQ ID NO: 3194, SEQ ID NO: 3193; Product Oligonucleotides - SEQ ID NO:
3198, SEQ ID NO: 3197.

[0814] Activity relative to SEQ ID NO: 3104 (Activity FIOP) was calculated based on the percentage of extension products observed for the variant compared with the percentage observed with SEQ ID NO: 3104 (where the percent product may be set as the average of replicates or else the highest single sample as appropriate). The results are shown in Table 48.2.

TABLE 48.2
adenylate kinase activity relative to SEQ ID NO: 3104

| | | FIOP activity |
|---|---|---|
| SEQ ID NO: | Amino Acid Differences | relative to |
| (nt/aa) | (Relative to SEQ ID NO: 3104) | SEQ ID NO: 3104 |
| 3151/3152 | A104R/V157P/W228V/S229I | +++ |
| 3153/3154 | A104R | +++ |
| 3155/3156 | A104R/V157P/S229I | +++ |
| 3157/3158 | V157P/W228V/S229I | +++ |
| 3159/3160 | A104R/S170P/Q190R/W228V | ++ |
| 3161/3162 | A104R/V157P | ++ |
| 3163/3164 | Q190R | ++ |
| 3165/3166 | A201S/W228V | + |
| 3167/3168 | Q190R/S229I | + |
| 3169/3170 | S170P/Q190R/W228V | + |
| 3171/3172 | S170P/Q190R/W228V/S229I | + |
| 3173/3174 | V157P/W228V | + |
| 3175/3176 | A104R/A201S/W228V | + |

Levels of increased activity were determined for FIOP activity relative to SEQ ID NO: 3104 and are defined as follows: “+” > 1.5, “++” > 2.0, “+++” > 3.0.

### Example 49

### Improvements Over SEQ ID NO: 3104 in Conversion of Nucleoside Monophosphates to Nucleotides

### HTP Screening for Improved AdyK Variants

[0815] Adenylate kinase of SEQ ID NO: 3104 was selected as the parent adenylate kinase enzyme. Libraries of genes were produced from the parent gene using various techniques (e.g. saturation mutagenesis and recombination of previously identified beneficial mutations). The polypeptides encoded by each gene were produced in HTP and prepared as described in Table 49.1.

[0816] Reactions were performed as described in Example 39 using conditions summarized in Table 49.1. Data were collected using the CE assay described in Example 6.

TABLE 49.1
Reaction conditions

Lysis Buffer - TEoA (pH 7.5), 0.1 g/L lysozyme; Lysis Conditions - 100 μL, 60° C., 60 min;
Reaction buffer - 50 mM Tris, 50 mM sodium pyruvate, 50 mM dibasic potassium phosphate, 10
uM ATP, 10 mM magnesium chloride, pH 8.0; Lysate concentration (vol %) - 10; Reaction
Conditions - 1 μL, 30° C., 16 hr; Nucleoside substrate - mU; Substrate Concentration - 10 mM;
Auxiliary Cascade Enzymes - SEQ ID NO: 2666 (10 μM), SEQ ID NO: 2668 (0.25 g/L lyophilized
lysate), SEQ ID NO: 2674 (0.25 μM); Dilution into Coupling Reaction - 800X; Substrate
Oligonucleotides - SEQ ID NO: 3194, SEQ ID NO: 3193; Product Oligonucleotides - SEQ ID NO:
3198, SEQ ID NO: 3197.

[0817] Stability relative to SEQ ID NO: 3104 (Stability FIOP) was calculated based on the percentage of extension products observed for the variant compared with the percentage observed with SEQ ID NO: 3104 (where the percent product may be set as the average of replicates or else the highest single sample as appropriate). The results are shown in Table 49.2.

TABLE 49.2
Adenylate kinase activity relative to SEQ ID NO: 3104

| | | FIOP stability |
|---|---|---|
| SEQ ID NO: | Amino Acid Differences | relative to |
| (nt/aa) | (Relative to SEQ ID NO: 3104) | SEQ ID NO: 3104 |
| 3153/3154 | A104R | ++ |
| 3177/3178 | A104R/Q190R/A201S | +++ |
| 3179/3180 | A104R/Q190R/W228V | ++ |
| 3181/3182 | W228V | ++ |
| 3183/3184 | A104R/Q190R | + |
| 3185/3186 | A104R/V157P/Q190R/W228V | + |
| 3187/3188 | A104R/S170P/Q190R | + |
| 3189/3190 | A104R/W228V/S229I | + |
| 3191/3192 | A104R/S170P/W228V | + |

Levels of increased activity were determined for FIOP stability relative to SEQ ID NO: 3104 and are defined as follows: “+” > 1.5, “++” > 2.5, “+++” > 3.5.

### Example 50

### Relative Activities of AdyK Variants for the Conversion of Nucleosides to Nucleotides

### Shake Flask Characterization of AdoK Variants

[0818] AdyK variants SEQ ID NO: 2, SEQ ID NO: 1032, SEQ ID NO: 1708, SEQ ID NO: 1980, SEQ ID NO: 2138, SEQ ID NO: 2368, SEQ ID NO: 2832 and SEQ ID NO: 3152 were expressed as described in Example 3 and either purified or lyophilized.

[0819] To assess activity, each variant was added to a 5 μL reaction at a final concentration of 10 μM. The reaction contained 50 mM Tris (pH 8.0), 50 mM sodium pyruvate, 50 mM potassium phosphate, 10 μM ATP, 10 mM MgCl₂, 0.4 g/L lyophilized lysate SEQ ID NO: 2666, 0.25 g/L lyophilized lysate SEQ ID NO: 2668, 0.25 g/L lyophilized lysate SEQ ID NO: 2674 and 10 mM nucleoside. Reactions were incubated in a Multitron (Infors) shaker at 30° C. & 600 rpm for 16 hours. Reactions were then quenched and diluted 40-fold with 75% methanol and analyzed by HPLC as described in Example 5. Relative activities were normalized to the lowest observed activity by a variant on a given substrate. The results are shown in Table 50.1.

TABLE 50.1
Adenylate kinase activity relative to SEQ ID NO: 2

| | fA | fC | fG | fU | mA | mC | mG | mU |
|---|---|---|---|---|---|---|---|---|
| | relative | relative | relative | relative | relative | relative | relative | relative |
| SEQ ID | to SEQ | to SEQ | to SEQ | to SEQ | to SEQ | to SEQ | to SEQ | to SEQ |
| NO: | ID NO: | ID NO: | ID NO: | ID NO: | ID NO: | ID NO: | ID NO: | ID NO: |
| (nt/aa) | 2 | 2 | 2 | 2 | 2 | 2 | 2 | 2 |
| 1/2 | ++ | ++ | + | + | ++ | + | + | + |
| 1031/1032 | ++ | +++ | + | ++ | ++ | +++ | + | +++ |
| 1707/1708 | ++ | +++ | ++ | ++ | ++ | +++ | + | +++ |
| 1979/1980 | ++ | +++ | ++ | ++ | ++ | +++ | + | +++ |
| 2137/2138 | ++ | +++ | ++ | ++ | ++ | +++ | + | +++ |
| 2367/2368 | ++ | +++ | + | ++ | +++ | +++ | ++ | +++ |
| 2831/2832 | ++ | +++ | + | ++ | ++ | +++ | ++ | +++ |
| 3151/3152 | +++ | +++ | ++ | ++ | +++ | +++ | ++ | +++ |

Percent yield of NTP were determined for fA relative to SEQ ID NO: 2 and are defined as follows: “+” > 0.1, “++” > 2.0, “+++” > 20.0. Percent yield of NTP were determined for fC relative to SEQ ID NO: 2 and are defined as follows: “+” > 0.1, “++” > 2.0, “+++” > 20.0. Percent yield of NTP were determined for fG relative to SEQ ID NO: 2 and are defined as follows: “+” > 0.1, “++” > 2.0, “+++” > 20.0. Percent yield of NTP were determined for fU relative to SEQ ID NO: 2 and are defined as follows: “+” > 0.1, “++” > 2.0, “+++” > 20.0. Percent yield of NTP were determined for mA relative to SEQ ID NO: 2 and are defined as follows: “+” > 0.1, “++” > 2.0, “+++” > 20.0. Percent yield of NTP were determined for mC relative to SEQ ID NO: 2 and are defined as follows: “+” > 0.1, “++” > 2.0, “+++” > 20.0. Percent yield of NTP were determined for mG relative to SEQ ID NO: 2 and are defined as follows: “+” > 0.1, “++” > 2.0, “+++” > 20.0. Percent yield of NTP were determined for mU relative to SEQ ID NO: 2 and are defined as follows: “+” > 0.1, “++” > 2.0, “+++” > 20.0.

[0820] While the invention has been described with reference to the specific embodiments, various changes can be made and equivalents can be substituted to adapt to a particular situation, material, composition of mailer, process, process step or steps, without departing from the spirit and scope of the invention.

[0821] For all purposes, each and every publication and patent document cited in this disclosure is incorporated herein by reference as if each such publication or document was specifically and individually indicated to be incorporated herein by reference. Citation of publications and patent documents is not intended as an indication that any such document is pertinent prior art, nor does it constitute an admission as to its contents or date.

The application's sequence listing, which the Patent Office published only in electronic form, follows.

SEQUENCE LISTING (3200 sequences)

SEQ ID NO: 1 - DNA, 693 bp, synthetic construct
  misc_feature 1..693: note = Variant of adenylate kinase
  source 1..693: mol_type = other DNA
atgcaccatcatcaccatcacgggggctccggcatgatggcatatctggtgtttttaggtccgccgggcgcgggaaaaggtacctacgccaaacgcattcaggaaaagactggcatcccacatattagcacgggcgatatcttccgtgacatcgtcaagaaagagaacgatgaactgggcaagaagattaaagaaatcatggagaaaggtgaactcgttccagatgaactggtgaatgaggtagtaaaacgccgcctgtcggagaaagactgcgaaaaaggctttattttggatggttatccgcgtaccgttgctcaagcggaattcctggacagttttcttgaatcccagaacaaacagttgacagccgccgtgctgttcgatgtccccgaagatgttgttgtgcaacgtttaacctctcgccgcatctgtccgaaatgcgggcgtatctacaatatgatttcactgccaccaaaagaagacgagctgtgtgacgattgcaaagtcaaattagtacagcgtgatgatgataaggaagaaacggttcgtcaccgctataaagtctaccttgagaagacccagccggtcattgactattatggcaagaaaggtattctcaaacgcgtagatggcacgattggaatcgacaacgttgttgcagaagtcctgaagattattggttggagcgataag

SEQ ID NO: 2 - protein, 231 aa, synthetic construct
  REGION 1..231: note = Variant of adenylate kinase
MHHHHHHGGSGMMAYLVFLGPPGAGKGTYAKRIQEKTGIPHISTGDIFRDIVKKENDELGKKIKEIMEKGELVPDELVNEVVKRRLSEKDCEKGFILDGYPRTVAQAEFLDSFLESQNKQLTAAVLFDVPEDVVVQRLTSRRICPKCGRIYNMISLPPKEDELCDDCKVKLVQRDDDKEETVRHRYKVYLEKTQPVIDYYGKKGILKRVDGTIGIDNVVAEVLKIIGWSDK

SEQ ID NO: 3 - DNA, 693 bp, synthetic construct
  misc_feature 1..693: note = Variant of adenylate kinase
  source 1..693: mol_type = other DNA
atgcaccatcatcaccatcacgggggctccggcatgatggcatatctggtgttcttaggtccgccgggcgcgggaaaaggtacccaatcgaaacgcattcaggaaaagactggcatcccacatattagcacgggcgatatcttccgtgacatcgtcaagaaagagaacgatgaactgggcaagaagattaaagaaatcatggagaaaggtgaactcgttccagatgaactggtgaatgaggtagtaaaacgccgcctgtcggagaaagactgcgaaaaaggctttattttggatggttatccgcgtaccgttgctcaagcggaattcctggacagttttcttgaatcccagaacaaacagttgacagccgccgtgctgttcaaagtccccgaagatgttgttgtgcaacgtttaacctctcgcctgatctgtccgaaatgcgggcgtatctacaatatgatttcactgccaccaaaagaagacgagctgtgtgacgattgcaaagtcaaattagtacagcgtgatgatgataaggaagaaacggttcgtcaccgcctgaaagtctaccttgagaagacccagccggtcattgactattatggcaagaaaggtattctcaaacgcgtagatgggtcgcaaggaatcgacaacgttgttgcagaagtcctgaagattattggttggagcgataag

SEQ ID NO: 4 - protein, 231 aa, synthetic construct
  REGION 1..231: note = Variant of adenylate kinase
MHHHHHHGGSGMMAYLVFLGPPGAGKGTQSKRIQEKTGIPHISTGDIFRDIVKKENDELGKKIKEIMEKGELVPDELVNEVVKRRLSEKDCEKGFILDGYPRTVAQAEFLDSFLESQNKQLTAAVLFKVPEDVVVQRLTSRLICPKCGRIYNMISLPPKEDELCDDCKVKLVQRDDDKEETVRHRLKVYLEKTQPVIDYYGKKGILKRVDGSQGIDNVVAEVLKIIGWSDK

SEQ ID NO: 5 - DNA, 693 bp, synthetic construct
  misc_feature 1..693: note = Variant of adenylate kinase
  source 1..693: mol_type = other DNA
atgcaccatcatcaccatcacgggggctccggcatgatggcatatctggtgctgttaggtccgccgggcgcgggaaaaggtacctacgccaaacgcattcaggaaaagactggcatcccacatattagcacgggcgatatcttccgtgacatcgtcaagaaagagaacgatgaactgggcaagaagattaaagaaatcatggagaaaggtgaactcgttccagatgaactggtgaatgaggtagtaaaacgccgcctgtcggagaaagactgcgaaaaaggctttattttggatggttatccgcgtaccgttgctcaagcggaattcctggacagttttcttgaatcccagaacaaacagttgacagccgccgtgctgttcgatgtccccgaagatgttgttgtgcaacgtttaacctctcgcctgatctgtccgaaatgcgggcgtatctacaatatgatttcactgccaccaaaagaagacgagctgtgtgacgattgcaaagtcaaattagtacagcgtgacgatgataaggaagaaacggttcgtcaccgctataaagtctaccttgagaagacccagccggtcattgactattatggcaagaaaggtattctcaaacgcgtagatgggtcgcaaggaatcgacaacgttgttgcagaagtcctgaagattattggttggagcgataag

SEQ ID NO: 6 - protein, 231 aa, synthetic construct
  REGION 1..231: note = Variant of adenylate kinase
MHHHHHHGGSGMMAYLVLLGPPGAGKGTYAKRIQEKTGIPHISTGDIFRDIVKKENDELGKKIKEIMEKGELVPDELVNEVVKRRLSEKDCEKGFILDGYPRTVAQAEFLDSFLESQNKQLTAAVLFDVPEDVVVQRLTSRLICPKCGRIYNMISLPPKEDELCDDCKVKLVQRDDDKEETVRHRYKVYLEKTQPVIDYYGKKGILKRVDGSQGIDNVVAEVLKIIGWSDK

SEQ ID NO: 7 - DNA, 693 bp, synthetic construct
  misc_feature 1..693: note = Variant of adenylate kinase
  source 1..693: mol_type = other DNA
atgcaccatcatcaccatcacgggggctccggcatgatggcatatctggtgtttttaggtccgccgggcgcgggaaaaggtacccaatcgaaacgcattcaggaaaagactggcatcccacatattagcacgggcgatatcttccgtgacatcgtcaagaaagagaacgatgaactgggcaagaagattaaagaaatcatggagaaaggtgaactcgttccagatgaactggtgaatgaggtagtaaaacgccgcctgtcggagaaagactgcgaaaaaggctttattttggatggttatccgcgtaccgttgctcaagcggaattcctggacagttttcttgaatcccagaacaaacagttgacagccgccgtgctgttcaaagtccccgaagatgttgttgtgcaacgtttaacctctcgcctgatctgtccgaaatgcgggcgtatctacaatatgatttcactgccaccaaaagaagacgagctgtgtgacgattgcaaagtcaaattagtacagcgtgatgatgataaggaagaaacggttcgtcaccgcctgaaagtctaccttgagaagacccagccggtcattgactattatggcaagaaaggtattctcaaacgcgtagatggcacgattggaatcgacaacgttgttgcagaagtcctgaagattattggttggagcgataag

SEQ ID NO: 8 - protein, 231 aa, synthetic construct
  REGION 1..231: note = Variant of adenylate kinase
MHHHHHHGGSGMMAYLVFLGPPGAGKGTQSKRIQEKTGIPHISTGDIFRDIVKKENDELGKKIKEIMEKGELVPDELVNEVVKRRLSEKDCEKGFILDGYPRTVAQAEFLDSFLESQNKQLTAAVLFKVPEDVVVQRLTSRLICPKCGRIYNMISLPPKEDELCDDCKVKLVQRDDDKEETVRHRLKVYLEKTQPVIDYYGKKGILKRVDGTIGIDNVVAEVLKIIGWSDK

SEQ ID NO: 9 - DNA, 693 bp, synthetic construct
  misc_feature 1..693: note = Variant of adenylate kinase
  source 1..693: mol_type = other DNA
atgcaccatcatcaccatcacgggggctccggcatgatggcatatctggtgtttttaggtccgccgggcgcgggaaaaggtacctacgccaaacgcattcaggaaaagactggcatctgtcatattagtacgggcgatatcttccgtgacatcgtcaagaaagagaacgatgaactgggcaagaagattaaagaaatcatggagaaaggtgaactcgttccagatgaactggtgaatgaggtagtaaaacgccgcctgtcggagaaagactgcgaaaaaggctttattttggatggttatccgcgtaccgttgctcaagcggaattcctggacagttttcttgaatcccagaacaaacagttgacagccgccgtgctgttcgatgtccccgaagatgttgttccacagcgtttaacctctcgccgcatctgtccgaaatgcgggcgtatctacaatatgatttcactgccaccaaaagaagacgagctgtgtgacgattgcaaagtcaaattagtacagcgtgatgatgataaggaagaaacggttcgtcaccgctataaagtctaccttgagaagacccagccggtcattgactattatggcaagaaaggtattctcaaacgcgtagatggcacgattccaatcgataacgttgttgcagaagtcctgaagattattggttggagcgataag

SEQ ID NO: 10 - protein, 231 aa, synthetic construct
  REGION 1..231: note = Variant of adenylate kinase
MHHHHHHGGSGMMAYLVFLGPPGAGKGTYAKRIQEKTGICHISTGDIFRDIVKKENDELGKKIKEIMEKGELVPDELVNEVVKRRLSEKDCEKGFILDGYPRTVAQAEFLDSFLESQNKQLTAAVLFDVPEDVVPQRLTSRRICPKCGRIYNMISLPPKEDELCDDCKVKLVQRDDDKEETVRHRYKVYLEKTQPVIDYYGKKGILKRVDGTIPIDNVVAEVLKIIGWSDK

SEQ ID NO: 11 - DNA, 693 bp, synthetic construct
  misc_feature 1..693: note = Variant of adenylate kinase
  source 1..693: mol_type = other DNA
atgcaccatcatcaccatcacgggggctccggcatgatggcatatctggtgctgttaggtccgccgggcgcgggaaaaggtacccaatcgaaacgcattcaggaaaagactggcatcccacatattagcacgggcgatatcttccgtgacatcgtcaagaaagagaacgatgaactgggcaagaagattaaagaaatcatggagaaaggtgaactcgttccagatgaactggtgaatgaggtagtaaaacgccgcctgtcggagaaagactgcgaaaaaggctttattttggatggttatccgcgtaccgttgctcaagcggaattcctggacagttttcttgaatcccagaacaaacagttgacagccgccgtgctgctggatgtccccgaagatgttgttgtgcaacgtttaacctctcgccgtatctgtccgaaatgcgggcgtagctacaatatgatttcactgccaccaaaagaagacgagctgtgtgacgattgcaaagtcaaattagtacagcgtgacgatgataaggaagaaacggttcgtcaccgctataaagtctaccttgagaagacccagccggtcattgactattatggcaagaaaggtattctcaaacgcgtagatggcacgattggaatcgacaacgttgttgcagaagttctgaagattattggttggagcgataag

SEQ ID NO: 12 - protein, 231 aa, synthetic construct
  REGION 1..231: note = Variant of adenylate kinase
MHHHHHHGGSGMMAYLVLLGPPGAGKGTQSKRIQEKTGIPHISTGDIFRDIVKKENDELGKKIKEIMEKGELVPDELVNEVVKRRLSEKDCEKGFILDGYPRTVAQAEFLDSFLESQNKQLTAAVLLDVPEDVVVQRLTSRRICPKCGRSYNMISLPPKEDELCDDCKVKLVQRDDDKEETVRHRYKVYLEKTQPVIDYYGKKGILKRVDGTIGIDNVVAEVLKIIGWSDK

SEQ ID NO: 13 - DNA, 693 bp, synthetic construct
  misc_feature 1..693: note = Variant of adenylate kinase
  source 1..693: mol_type = other DNA
atgcaccatcatcaccatcacgggggctccggcatgatggcatatctggtgtttttaggtccgccgggcgcgggaaaaggtacctacgccaaacgcattcaggaaaagactggcatcccacatattagcacgggcgatatcttccgtgacatcgtcaagaaagagaacgatgaactgggcaagaagattaaagaaatcatggagaaaggtgaactcgttccagatgaactggtgaatgaggtaatcaaacgccgcctgtcggagaaagactgcgaaaaaggctttattttggatggttatccgcgtaccgttgctcaagcggaattcctggacagttttcttgaatcccagaacaaacagttgacagccgccgtgctgttcgatgtccccgaagatgttgttgtgcaacgtttaacctctcgccgcatctgtccgaaatgcgggcgtatctacaatatgatttcactgccaccaaaagaagacgagctgtgtgacgattgcaaagtcaaattagtacagcgtgatgatgataaggaagaaacggttcgtcaccgctataaagtctaccttgagaagacccagccggtcattgactattatggcaagaaaggtattctcaaacgcgtagatggcacgattggaatcgacaacgttgttgcagaagtcctgaagattattggttggagcgataag

SEQ ID NO: 14 - protein, 231 aa, synthetic construct
  REGION 1..231: note = Variant of adenylate kinase
MHHHHHHGGSGMMAYLVFLGPPGAGKGTYAKRIQEKTGIPHISTGDIFRDIVKKENDELGKKIKEIMEKGELVPDELVNEVIKRRLSEKDCEKGFILDGYPRTVAQAEFLDSFLESQNKQLTAAVLFDVPEDVVVQRLTSRRICPKCGRIYNMISLPPKEDELCDDCKVKLVQRDDDKEETVRHRYKVYLEKTQPVIDYYGKKGILKRVDGTIGIDNVVAEVLKIIGWSDK

SEQ ID NO: 15 - DNA, 693 bp, synthetic construct
  misc_feature 1..693: note = Variant of adenylate kinase
  source 1..693: mol_type = other DNA
atgcaccatcatcaccatcacgggggctccggcatgatggcatatctggtgtttttaggtccgccgggcgcgggaaaaggtacctacgccaaacgcattcaggaaaagactggcatcccacatattagcacgggcgatatcttccgtgacatcgtcaagaaagagaacgatgaactgggcaagaagattaaagaaatcatggagcagggtgaactcgttccagatgaactggtgaatgaggtagtaaaacgccgcctgtcggagaaagactgcgaaaaaggctttattttggatggttatccgcgtaccgttgctcaagcggaattcctggacagttttcttgaatcccagaacaaacagttgacagccgccgtgctgttcgatgtccccgaagatgttgttgtgcaacgtttaacctctcgccgcatctgtccgaaatgcgggcgtatctacaatatgatttcactgccaccaaaagaagacgagctgtgtgacgattgcaaagtcaaattagtacagcgtgatgatgataaggaagaaacggttcgtcaccgctataaagtctaccttgagaagacccagccggtcattgactattatggcaagaaaggtattctcaaacgcgtagatggcacgattggaatcgacaacgttgttgcagaagtcctgaagattattggttggagcgataag

SEQ ID NO: 16 - protein, 231 aa, synthetic construct
  REGION 1..231: note = Variant of adenylate kinase
MHHHHHHGGSGMMAYLVFLGPPGAGKGTYAKRIQEKTGIPHISTGDIFRDIVKKENDELGKKIKEIMEQGELVPDELVNEVVKRRLSEKDCEKGFILDGYPRTVAQAEFLDSFLESQNKQLTAAVLFDVPEDVVVQRLTSRRICPKCGRIYNMISLPPKEDELCDDCKVKLVQRDDDKEETVRHRYKVYLEKTQPVIDYYGKKGILKRVDGTIGIDNVVAEVLKIIGWSDK

SEQ ID NO: 17 - DNA, 693 bp, synthetic construct
  misc_feature 1..693: note = Variant of adenylate kinase
  source 1..693: mol_type = other DNA
atgcaccatcatcaccatcacgggggctccggcatgatggcatatctggtgtttttaggtccgccgggcgcgggaaaaggtacctacgccaaacgcattcaggaaaagactggcatcccacatattagcacgggcgatatcttccgtgacatcgtcaagaaagagaacgatgaactgggcaagaagattaaagaaatcatggagaaaggtgaactcgttccagatgaactggtgaatgaggtagtaaaacgccgcctgtcggagaaagactgcgaaaaaggctttattttggatggttatccgcgtaccgttgctcaagcggaattcctggacagttttcttgaatcccaggggaaacagttgacagccgccgtgctgttcgatgtccccgaagatgttgttgtgcaacgtttaacctctcgccgcatctgtccgaaatgcgggcgtatctacaatatgatttcactgccaccaaaagaagacgagctgtgtgacgattgcaaagtcaaattagtacagcgtgatgatgataaggaagaaacggttcgtcaccgctataaagtctaccttgagaagacccagccggtcattgactattatggcaagaaaggtattctcaaacgcgtagatggcacgattggaatcgacaacgttgttgcagaagtcctgaagattattggttggagcgataag

SEQ ID NO: 18 - protein, 231 aa, synthetic construct
  REGION 1..231: note = Variant of adenylate kinase
MHHHHHHGGSGMMAYLVFLGPPGAGKGTYAKRIQEKTGIPHISTGDIFRDIVKKENDELGKKIKEIMEKGELVPDELVNEVVKRRLSEKDCEKGFILDGYPRTVAQAEFLDSFLESQGKQLTAAVLFDVPEDVVVQRLTSRRICPKCGRIYNMISLPPKEDELCDDCKVKLVQRDDDKEETVRHRYKVYLEKTQPVIDYYGKKGILKRVDGTIGIDNVVAEVLKIIGWSDK

SEQ ID NO: 19 - DNA, 693 bp, synthetic construct
  misc_feature 1..693: note = Variant of adenylate kinase
  source 1..693: mol_type = other DNA
atgcaccatcatcaccatcacgggggctccggcatgatggcatatctggtgttcttaggtccgccgggcgcgggaaaaggtacccaatcgaaacgcattcaggaaaagactggcatcccacatattagcacgggcgatatcttccgtgacatcgtcaagaaagagaacgatgaactgggcaagaagattaaagaaatcatggagaaaggtgaactcgttccagatgaactggtgaatgaggtagtaaaacgccgcctgtcggagaaagactgcgaaaaaggctttattttggatggttatccgcgtaccgttgctcaagcggaattcctggacagttttcttgaatcccagaacaaacagttgacagccgccgtgctgttcgatgtccccgaagatgttgttgtgcaacgtttaacctctcgccgcatctgtccgaaatgcgggcgtatctacaatatgatttcactgccaccaaaagaagacgagctgtgtgacgattgcaaagtcaaattagtacagcgtgatgatgataaggaagaaacggttcgtcaccgctataaagtctaccttgagaagacccagccggtcattgactattatggcaagaaaggtattctcaaacgcgtagatggcacgattggaatcgacaacgttgttgcagaagtcctgaagattattggttggagcgataag

SEQ ID NO: 20 - protein, 231 aa, synthetic construct
  REGION 1..231: note = Variant of adenylate kinase
MHHHHHHGGSGMMAYLVFLGPPGAGKGTQSKRIQEKTGIPHISTGDIFRDIVKKENDELGKKIKEIMEKGELVPDELVNEVVKRRLSEKDCEKGFILDGYPRTVAQAEFLDSFLESQNKQLTAAVLFDVPEDVVVQRLTSRRICPKCGRIYNMISLPPKEDELCDDCKVKLVQRDDDKEETVRHRYKVYLEKTQPVIDYYGKKGILKRVDGTIGIDNVVAEVLKIIGWSDK

SEQ ID NO: 21 - DNA, 693 bp, synthetic construct
  misc_feature 1..693: note = Variant of adenylate kinase
  source 1..693: mol_type = other DNA
atgcaccatcatcaccatcacgggggctccggcatgatggcatatctggtgtttttaggtccgccgggcgcgggaaaaggtacctacgccaaacgcattcaggaaaagactggcatcccacatattagcacgggcgatatcttccgtgacatcgtcaagaaagagaacgatgaactgggcaagaagattaaagaaatcatggagaaaggtgaactcgttccagatgaactggtgaatgaggtagtaaaacgccgcctgtcggagaaagactgcgaaaaaggctttattttggatggttatccgcgtaccgttgctcaagcggaattcctggacagttttcttgaatcccagaacaaacagttgacagccgccgtgctgttcgatgtccccgaagatgttgttgtgcaacgtttaacctctcgccgcatctgtccgaaatgcgggcgtatctacaatatgatttcactgccaccaaaagaagacgagctgtgtgacgattgcaaagtcaaattagtacagcgtgatgatgataaggaagaaacggttcgtcaccgctataaagtctaccttgagaagacccagccggtcattgactattatggcaagaaaggtatttggaaacgcgtagatggcacgattggaatcgacaacgttgttgcagaagtcctgaagattattggttggagcgataag

SEQ ID NO: 22 - protein, 231 aa, synthetic construct
  REGION 1..231: note = Variant of adenylate kinase
MHHHHHHGGSGMMAYLVFLGPPGAGKGTYAKRIQEKTGIPHISTGDIFRDIVKKENDELGKKIKEIMEKGELVPDELVNEVVKRRLSEKDCEKGFILDGYPRTVAQAEFLDSFLESQNKQLTAAVLFDVPEDVVVQRLTSRRICPKCGRIYNMISLPPKEDELCDDCKVKLVQRDDDKEETVRHRYKVYLEKTQPVIDYYGKKGIWKRVDGTIGIDNVVAEVLKIIGWSDK

SEQ ID NO: 23 - DNA, 693 bp, synthetic construct
  misc_feature 1..693: note = Variant of adenylate kinase
  source 1..693: mol_type = other DNA
atgcaccatcatcaccatcacgggggctccggcatgatggcatatctggtgtttttaggtccgccgggcgcgggaaaaggtacctacgccaaaaacattcaggaaaagactggcatcccacatattagcacgggcgatatcttccgtgacatcgtcaagaaagagaacgatgaactgggcaagaagattaaagaaatcatggagaaaggtgaactcgttccagatgaactggtgaatgaggtagtaaaacgccgcctgtcggagaaagactgcgaaaaaggctttattttggatggttatccgcgtaccgttgctcaagcggaattcctggacagttttcttgaatcccagaacaaacagttgacagccgccgtgctgttcgatgtccccgaagatgttgttgtgcaacgtttaacctctcgccgcatctgtccgaaatgcgggcgtatctacaatatgatttcactgccaccaaaagaagacgagctgtgtgacgattgcaaagtcaaattagtacagcgtgatgatgataaggaagaaacggttcgtcaccgctataaagtctaccttgagaagacccagccggtcattgactattatggcaagaaaggtattctcaaacgcgtagatggcacgattggaatcgacaacgttgttgcagaagtcctgaagattattggttggagcgataag

SEQ ID NO: 24 - protein, 231 aa, synthetic construct
  REGION 1..231: note = Variant of adenylate kinase
MHHHHHHGGSGMMAYLVFLGPPGAGKGTYAKNIQEKTGIPHISTGDIFRDIVKKENDELGKKIKEIMEKGELVPDELVNEVVKRRLSEKDCEKGFILDGYPRTVAQAEFLDSFLESQNKQLTAAVLFDVPEDVVVQRLTSRRICPKCGRIYNMISLPPKEDELCDDCKVKLVQRDDDKEETVRHRYKVYLEKTQPVIDYYGKKGILKRVDGTIGIDNVVAEVLKIIGWSDK

SEQ ID NO: 25 - DNA, 693 bp, synthetic construct
  misc_feature 1..693: note = Variant of adenylate kinase
  source 1..693: mol_type = other DNA
atgcaccatcatcaccatcacgggggctccggcatgatggcatatatggtgtttttaggtccgccgggcgcgggaaaaggtacctacgccaaacgcattcaggaaaagactggcatcccacatattagcacgggcgatatcttccgtgacatcgtcaagaaagagaacgatgaactgggcaagaagattaaagaaatcatggagaaaggtgaactcgttccagatgaactggtgaatgaggtagtaaaacgccgcctgtcggagaaagactgcgaaaaaggctttattttggatggttatccgcgtaccgttgctcaagcggaattcctggacagttttcttgaatcccagaacaaacagttgacagccgccgtgctgttcgatgtccccgaagatgttgttgtgcaacgtttaacctctcgccgcatctgtccgaaatgcgggcgtatctacaatatgatttcactgccaccaaaagaagacgagctgtgtgacgattgcaaagtcaaattagtacagcgtgatgatgataaggaagaaacggttcgtcaccgctataaagtctaccttgagaagacccagccggtcattgactattatggcaagaaaggtattctcaaacgcgtagatggcacgattggaatcgacaacgttgttgcagaagtcctgaagattattggttggagcgataag

SEQ ID NO: 26 - protein, 231 aa, synthetic construct
  REGION 1..231: note = Variant of adenylate kinase
MHHHHHHGGSGMMAYMVFLGPPGAGKGTYAKRIQEKTGIPHISTGDIFRDIVKKENDELGKKIKEIMEKGELVPDELVNEVVKRRLSEKDCEKGFILDGYPRTVAQAEFLDSFLESQNKQLTAAVLFDVPEDVVVQRLTSRRICPKCGRIYNMISLPPKEDELCDDCKVKLVQRDDDKEETVRHRYKVYLEKTQPVIDYYGKKGILKRVDGTIGIDNVVAEVLKIIGWSDK

SEQ ID NO: 27 - DNA, 693 bp, synthetic construct
  misc_feature 1..693: note = Variant of adenylate kinase
  source 1..693: mol_type = other DNA
atgcaccatcatcaccatcacgggggctccggcatgatggcatatctggtgtttttaggtccgccgggcgcgggaaaaggtacctacgccaaacgcattcaggaaaagactggcatcccacatattagcacgggcgatatcttccgtgacatcgtcaagaaagagaacgatgaactgggcaagaagattaaagaaatcatggagaaaggtgaactcgttccagatgaactggtgaatgaggtagtaaaacgccgcctgtcggagaaagactgcgaaaaaggctttattttggatggttatccgcgtaccatcgctcaagcggaattcctggacagttttcttgaatcccagaacaaacagttgacagccgccgtgctgttcgatgtccccgaagatgttgttgtgcaacgtttaacctctcgccgcatctgtccgaaatgcgggcgtatctacaatatgatttcactgccaccaaaagaagacgagctgtgtgacgattgcaaagtcaaattagtacagcgtgatgatgataaggaagaaacggttcgtcaccgctataaagtctaccttgagaagacccagccggtcattgactattatggcaagaaaggtattctcaaacgcgtagatggcacgattggaatcgacaacgttgttgcagaagtcctgaagattattggttggagcgataag

SEQ ID NO: 28 - protein, 231 aa, synthetic construct
  REGION 1..231: note = Variant of adenylate kinase
MHHHHHHGGSGMMAYLVFLGPPGAGKGTYAKRIQEKTGIPHISTGDIFRDIVKKENDELGKKIKEIMEKGELVPDELVNEVVKRRLSEKDCEKGFILDGYPRTIAQAEFLDSFLESQNKQLTAAVLFDVPEDVVVQRLTSRRICPKCGRIYNMISLPPKEDELCDDCKVKLVQRDDDKEETVRHRYKVYLEKTQPVIDYYGKKGILKRVDGTIGIDNVVAEVLKIIGWSDK

SEQ ID NO: 29 - DNA, 693 bp, synthetic construct
  misc_feature 1..693: note = Variant of adenylate kinase
  source 1..693: mol_type = other DNA
atgcaccatcatcaccatcacgggggctccggcatgatggcatatctggtgtttttaggtccgccgggcgcgggaaaaggtacctacgccaaacgtattcaggaaaagactggcatcccacatattagcacgggcgatatcttccgtgacatcgtcaagaaagagaacgatgaactgggcaagaagattaaagaaatcatggagaaaggtgaactcgttccagatgaactggtgaatgaggtagtaaaacgccgcctgtcggagaaagactgcgaaaaaggctttattttggatggttatccgcgtaccgttgctcaagcggaattcctggaaagttttcttgaatcccagaacaaacagttgacagccgccgtgctgttcgatgtccccgaagatgttgttccagcccgtttaacctctcgccgcatctgtccgaaatgcgggcgtatctacaatatgatttcactgccaccaaaagaagacgagctgtgtgacgattgcaaagtcaaattagtacagcgtgatgatgataaggaagaaacggttcgtcaccgctataaagtctaccttgagaagacccagccggtcattgactattatggcaagaaaggtattctcaaacgcgtagatggcacgattccaatcgataacgttgttgcagaagtcctgaagattattggttggagcgataag

SEQ ID NO: 30 - protein, 231 aa, synthetic construct
  REGION 1..231: note = Variant of adenylate kinase
MHHHHHHGGSGMMAYLVFLGPPGAGKGTYAKRIQEKTGIPHISTGDIFRDIVKKENDELGKKIKEIMEKGELVPDELVNEVVKRRLSEKDCEKGFILDGYPRTVAQAEFLESFLESQNKQLTAAVLFDVPEDVVPARLTSRRICPKCGRIYNMISLPPKEDELCDDCKVKLVQRDDDKEETVRHRYKVYLEKTQPVIDYYGKKGILKRVDGTIPIDNVVAEVLKIIGWSDK

SEQ ID NO: 31 - DNA, 693 bp, synthetic construct
  misc_feature 1..693: note = Variant of adenylate kinase
  source 1..693: mol_type = other DNA
atgcaccatcatcaccatcacgggggctccggcatgatggcatatctggtgttcttaggtccgccgggcgcgggaaaaggtacccaagcgaaacgcattcaggaaaagactggcatcccacatattagcacgggcgatatcttccgtgacatcgtcaagaaagagaacgatgaactgggcaagaagattaaagaaatcatggagaaaggtgaactcgttccagatgaactggtgaatgaggtagtaaaacgccgcctgtcggagaaagactgcgaaaaaggctttattttggatggttatccgcgtaccgttgctcaagcggaattcctggacagttttcttgaatcccagaacaaacagttgacagccgccgtgctgttcaaagtccccgaagatgttgttgtgcaacgtttaacctctcgccgtatctgtccgaaatgcgggcgtatctacaatatgatttcactgccaccaaaagaagacgagctgtgtgacgattgcaaagtcaaattagtacagcgttcggatgataaggaagaaacggttcgtcaccgctataaagtctaccttgagaagacccagccggtcattgactattatggcaagaaaggtattctcaaacgcgtagatggcacgattggaatcgacaacgttgttgcagaagtcctgaagattattggttggagcgataag

SEQ ID NO: 32 - protein, 231 aa, synthetic construct
  REGION 1..231: note = Variant of adenylate kinase
MHHHHHHGGSGMMAYLVFLGPPGAGKGTQAKRIQEKTGIPHISTGDIFRDIVKKENDELGKKIKEIMEKGELVPDELVNEVVKRRLSEKDCEKGFILDGYPRTVAQAEFLDSFLESQNKQLTAAVLFKVPEDVVVQRLTSRRICPKCGRIYNMISLPPKEDELCDDCKVKLVQRSDDKEETVRHRYKVYLEKTQPVIDYYGKKGILKRVDGTIGIDNVVAEVLKIIGWSDK

SEQ ID NO: 33 - DNA, 693 bp, synthetic construct
  misc_feature 1..693: note = Variant of adenylate kinase
  source 1..693: mol_type = other DNA
atgcaccatcatcaccatcacgggggctccggcatgatggcatatctggtgtttttaggtccgccgggcgcgggaaaaggtacctacgccaaacgcattcaggaaaagactggcatcccacatattagcacgggcgatatcttccgtgacatcgtcaagaaagagaacgatgaactgggcaagaagattaaagaaatcatggagaaaggtgaactcgttccagatgaactggtgaatgaggtagtaaaacgccgcctgtcggagaaagactgcgaaaaaggctttattttggatggttatccgcgtaccgttgctcaagcggaattcctggacagttttcttgaatcccagaacaaacagttgacagccgccgtgctgttcgatgtccccgaagatgttgttgtgcaacgtttaacctctcgccgcatctgtccgaaatgcgggcgtatctacaatatgatttcactgccaccaaaagaagacgagctgtgtgacgattgcaaagtcaaattagtacagcgtgatgatgataacgaagaaacggttcgtcaccgctataaagtctaccttgagaagacccagccggtcattgactattatggcaagaaaggtattctcaaacgcgtagatggcacgattggaatcgacaacgttgttgcagaagtcctgaagattattggttggagcgataag

SEQ ID NO: 34 - protein, 231 aa, synthetic construct
  REGION 1..231: note = Variant of adenylate kinase
MHHHHHHGGSGMMAYLVFLGPPGAGKGTYAKRIQEKTGIPHISTGDIFRDIVKKENDELGKKIKEIMEKGELVPDELVNEVVKRRLSEKDCEKGFILDGYPRTVAQAEFLDSFLESQNKQLTAAVLFDVPEDVVVQRLTSRRICPKCGRIYNMISLPPKEDELCDDCKVKLVQRDDDNEETVRHRYKVYLEKTQPVIDYYGKKGILKRVDGTIGIDNVVAEVLKIIGWSDK

SEQ ID NO: 35 - DNA, 693 bp, synthetic construct
  misc_feature 1..693: note = Variant of adenylate kinase
  source 1..693: mol_type = other DNA
atgcaccatcatcaccatcacgggggctccggcatgatggcatatctggtgctgttaggtccgccgggcgcgggaaaaggtacctacgccaaacgcattcaggaaaagactggcatcccacatattagcacgggcgatatcttccgtgacatcgtcaagaaagagaacgatgaactgggcaagaagattaaagaaatcatggagaaaggtgaactcgttccagatgaactggtgaatgaggtagtaaaacgccgcctgtcggagaaagactgcgaaaaaggctttattttggatggttatccgcgtaccgttgctcaagcggaattcctggacagttttcttgaatcccagaacaaacagttgacagccgccgtgctgttcaaagtccccgaagatgttgttgtgcaacgtttaacctctcgcctgatctgtccgaaatgcgggcgtatctacaatatgatttcactgccaccaaaagaagacgagctgtgtgacgattgcaaagtcaaattagtacagcgtgatgatgataaggaagaaacggttcgtcaccgctataaagtctaccttgagaagacccagccggtcattgactattatggcaagaaaggtattctcaaacgcgtagatgggacgatcggaatcgacaacgttgttgcagaagtcctgaagattattggttggagcgataag

SEQ ID NO: 36 - protein, 231 aa, synthetic construct
  REGION 1..231: note = Variant of adenylate kinase
MHHHHHHGGSGMMAYLVLLGPPGAGKGTYAKRIQEKTGIPHISTGDIFRDIVKKENDELGKKIKEIMEKGELVPDELVNEVVKRRLSEKDCEKGFILDGYPRTVAQAEFLDSFLESQNKQLTAAVLFKVPEDVVVQRLTSRLICPKCGRIYNMISLPPKEDELCDDCKVKLVQRDDDKEETVRHRYKVYLEKTQPVIDYYGKKGILKRVDGTIGIDNVVAEVLKIIGWSDK

SEQ ID NO: 37 - DNA, 693 bp, synthetic construct
  misc_feature 1..693: note = Variant of adenylate kinase
  source 1..693: mol_type = other DNA
atgcaccatcatcaccatcacgggggctccggcatgatggcatatctggtgtttttaggtccgccgggcgcgggaaaaggtacctacgccaaaaacattcaggaaaagactggcatcccacatattagtacgggcgatatcttccgtgacatcgtcaagaaagagaacgatgaactgggcaagaagattaaagaaatcatggagaaaggtgaactcgttccagatgaactggtgaatgaggtagtaaaacgccgcctgtcggagaaagactgcgaaaaaggctttattttggatggttatccgcgtaccgttgctcaagcgatgttcctggaaagttttcttgaatcccagaacaaacagttgacagccgccgtgctgttcgatgtccccgaagatgtggtggtgcaacgtttaacctctcgccgcatctgtccgaaatgcgggcgtatctacaatatgatttcgaacccaccaaaagaagacgagctgtgtgacgattgcaaagtcaaattagtacagcgtgatgatgataaggaagaaacggttcgtcaccgctataaagtctaccttaagaagacccagccggtcattgactattatggcaagaagggtattctcaaacgcgtagatggcacgattggcatcgataacgttgttgcagaagtcctgaagattattggttggagcgataag

SEQ ID NO: 38 - protein, 231 aa, synthetic construct
  REGION 1..231: note = Variant of adenylate kinase
MHHHHHHGGSGMMAYLVFLGPPGAGKGTYAKNIQEKTGIPHISTGDIFRDIVKKENDELGKKIKEIMEKGELVPDELVNEVVKRRLSEKDCEKGFILDGYPRTVAQAMFLESFLESQNKQLTAAVLFDVPEDVVVQRLTSRRICPKCGRIYNMISNPPKEDELCDDCKVKLVQRDDDKEETVRHRYKVYLKKTQPVIDYYGKKGILKRVDGTIGIDNVVAEVLKIIGWSDK

SEQ ID NO: 39 - DNA, 693 bp, synthetic construct
  misc_feature 1..693: note = Variant of adenylate kinase
  source 1..693: mol_type = other DNA
atgcaccatcatcaccatcacgggggctccggcatgatggcatatctggtgctgttaggtccgccgggcgcgggaaaaggtacccaagcgaaacgcattcaggaaaagactggcatcccacatattagcacgggcgatatcttccgtgacatcgtcaagaaagagaacgatgaactgggcaagaagattaaagaaatcatggagaaaggtgaactcgttccagatgaactggtgaatgaggtagtaaaacgccgcctgtcggagaaagactgcgaaaaaggctttattttggatggttatccgcgtaccgttgctcaagcggaattcctggacagttttcttgaatcccagaacaaacagttgacagccgccgtgctgttcaaaatccccgaagatgttgttgtgcaacgtttaacctctcgcctgatctgtccgaaatgcgggcgtatctacaatatgatttcactgccaccaaaagaagacgagctgtgtgacgattgcaaagtcaaattagtacagcgtgatgatgataaggaagaaacggttcgtcaccgcctgaaagtctaccttgagaagacccagccggtcattgactattatggcaagaaaggtattctcaaacgcgtagatgggacgatcggaatcgacaacgttgttgcagaagtcctgaagattattggttggagcgataag

SEQ ID NO: 40 - protein, 231 aa, synthetic construct
  REGION 1..231: note = Variant of adenylate kinase
MHHHHHHGGSGMMAYLVLLGPPGAGKGTQAKRIQEKTGIPHISTGDIFRDIVKKENDELGKKIKEIMEKGELVPDELVNEVVKRRLSEKDCEKGFILDGYPRTVAQAEFLDSFLESQNKQLTAAVLFKIPEDVVVQRLTSRLICPKCGRIYNMISLPPKEDELCDDCKVKLVQRDDDKEETVRHRLKVYLEKTQPVIDYYGKKGILKRVDGTIGIDNVVAEVLKIIGWSDK

SEQ ID NO: 41 - DNA, 693 bp, synthetic construct
  misc_feature 1..693: note = Variant of adenylate kinase
  source 1..693: mol_type = other DNA
atgcaccatcatcaccatcacgggggctccggcatgatggcatatctggtgtttttaggtccgccgggcgcgggaaaaggtacctacgccaaaaacattcaggaaaagactggcatcccacatattagcacgggcgatatcttccgtgacatcgtcaagaaagagaacgatgaactgggcaagaagattaaagaaatcatggagaaaggtgaactcgttccagatgaactggtgaatgaggtagtaaaacgccgcctgtcggagaaagactgcgaaaaaggctttattttggatggttatccgcgtaccgttgctcaagcggaattcctggacagttttcttgaatcccagaacaaacagttgacagccgccgtgctgttcgatgtccccgaagatctggtggtgcaacgtttaacctctcgccgcatctgtccgaaatgcgggcgtatctacaatatgatttcactgccaccaaaagaagacgagctgtgtgacgattgcaaagtcaaattagtacagcgtgatgatgataaggaagaaacggttcgtcaccgctataaagtctaccttgagaagacccagccggtcattgactattatggcaagaaaggtattctcaaacgcgtagatggcacgattggaatcgacaacgttgttgcagaagtcctgaagattattggttggagcgataag

SEQ ID NO: 42 - protein, 231 aa, synthetic construct
  REGION 1..231: note = Variant of adenylate kinase
MHHHHHHGGSGMMAYLVFLGPPGAGKGTYAKNIQEKTGIPHISTGDIFRDIVKKENDELGKKIKEIMEKGELVPDELVNEVVKRRLSEKDCEKGFILDGYPRTVAQAEFLDSFLESQNKQLTAAVLFDVPEDLVVQRLTSRRICPKCGRIYNMISLPPKEDELCDDCKVKLVQRDDDKEETVRHRYKVYLEKTQPVIDYYGKKGILKRVDGTIGIDNVVAEVLKIIGWSDK

SEQ ID NO: 43 - DNA, 693 bp, synthetic construct
  misc_feature 1..693: note = Variant of adenylate kinase
  source 1..693: mol_type = other DNA
atgcaccatcatcaccatcacgggggctccggcatgatggcatatctggtgctgttaggtccgccgggcgcgggaaaaggtacccaatcgaaacgcattcaggaaaagactggcatcccacatattagcacgggcgatatcttccgtgacatcgtcaagaaagagaacgatgaactgggcaagaagattaaagaaatcatggagaaaggtgaactcgttccagatgaactggtgaatgaggtagtaaaacgccgcctgtcggagaaagactgcgaaaaaggctttattttggatggttatccgcgtaccgttgctcaagcggaattcctggacagttttcttgaatcccagaacaaacagttgacagccgccgtgctgttcgatgtccccgaagatgttgttgtgcaacgtttaacctctcgccgtatctgtccgaaatgcgggcgtatctacaatatgatttcactgccaccaaaagaagacgagctgtgtgacgattgcaaagtcaaattagtacagcgtgatgatgataaggaagaaacggttcgtcaccgctataaagtctaccttgagaagacccagccggtcattgactattatggcaagaaaggtattctcaaacgcgtagatgggtcgcaaggaatcgacaacgttgttgcagaaattctgaagattattggttggagcgataag

SEQ ID NO: 44 - protein, 231 aa, synthetic construct
  REGION 1..231: note = Variant of adenylate kinase
MHHHHHHGGSGMMAYLVLLGPPGAGKGTQSKRIQEKTGIPHISTGDIFRDIVKKENDELGKKIKEIMEKGELVPDELVNEVVKRRLSEKDCEKGFILDGYPRTVAQAEFLDSFLESQNKQLTAAVLFDVPEDVVVQRLTSRRICPKCGRIYNMISLPPKEDELCDDCKVKLVQRDDDKEETVRHRYKVYLEKTQPVIDYYGKKGILKRVDGSQGIDNVVAEILKIIGWSDK

SEQ ID NO: 45 - DNA, 693 bp, synthetic construct
  misc_feature 1..693: note = Variant of adenylate kinase
  source 1..693: mol_type = other DNA
atgcaccatcatcaccatcacgggggctccggcatgatggcatatctggtgtttttaggtccgccgggcgcgggaaaaggtacccaagcgaaacgcattcaggaaaagactggcatcccacatattagcacgggcgatatcttccgtgacatcgtcaagaaagagaacgatgaactgggcaagaagattaaaaaaatcatggagaaaggtgaactcgttccagatgaactggtgaatgaggtagtaaaacgccgcctgtcggagaaagactgcgaaaaaggctttattttggatggttatccgcgtaccgttgctcaagcggaattcctggacagttttcttgaatcccagaacaaacagttgacagccgccgtgctgctggatgtccccgaagatgttgttgtgcaacgtttaacctctcgccgcatctgtccgaaatgcgggcgtatctacaatatgatttcactgccaccaaaagaagacgagctgtgtgacgattgcaaagtcaaattagtacagcgtgatgatgataaggaagaaacggttcgtcaccgctataaagtctaccttgagaagacccagccggtcattgactattatggcaagaaaggtattctcaaacgcgtagatggcacgattggaatcgacaacgttgttgcagaagtcctgaagattattggttggagcgataag

SEQ ID NO: 46 - protein, 231 aa, synthetic construct
  REGION 1..231: note = Variant of adenylate kinase
MHHHHHHGGSGMMAYLVFLGPPGAGKGTQAKRIQEKTGIPHISTGDIFRDIVKKENDELGKKIKKIMEKGELVPDELVNEVVKRRLSEKDCEKGFILDGYPRTVAQAEFLDSFLESQNKQLTAAVLLDVPEDVVVQRLTSRRICPKCGRIYNMISLPPKEDELCDDCKVKLVQRDDDKEETVRHRYKVYLEKTQPVIDYYGKKGILKRVDGTIGIDNVVAEVLKIIGWSDK

SEQ ID NO: 47 - DNA, 693 bp, synthetic construct
  misc_feature 1..693: note = Variant of adenylate kinase
  source 1..693: mol_type = other DNA
atgcaccatcatcaccatcacgggggctccggcatgatggcatatctggtgtttttaggtccgccgggcgcgggaaaaggtacctacgccaaaaacattcaggaaaagactggcatctgtcatattggtacgggcgatatcttccgtgacatccataagaaagagaacgatgaactgggcaagaagattaaagaaatcatggagaaaggtgaactcgttccagatgaactggtgaatgaggtagtaaaacgccgcctgtcggagaaagactgcgaaaaaggctttattttggatggttatccgcgtaccgttgctcaagcggaattcctggacagttttcttgaatcccagaacaaacagttgacagccgccgtgctgttcgatgtccccgaagatgttgttgtgcaacgtttaacctctcgccgcatctgtccgaaatgcgggcgtatctacaatatgatttttaacccaccaaaagaagacgagctgtgtgacgattgcaaagtcaaattagtacagcgtgatgatgataaggaagaaacggttcgtcaccgctataaagtctaccttgagaagacccagccggtcattgactattatggcaagaagggtattctcaaacgcgtagatggcacgattggaatcgacaccgttgtggcagaagtcctgaagattattggttggagcgataag

SEQ ID NO: 48 - protein, 231 aa, synthetic construct
  REGION 1..231: note = Variant of adenylate kinase
MHHHHHHGGSGMMAYLVFLGPPGAGKGTYAKNIQEKTGICHIGTGDIFRDIHKKENDELGKKIKEIMEKGELVPDELVNEVVKRRLSEKDCEKGFILDGYPRTVAQAEFLDSFLESQNKQLTAAVLFDVPEDVVVQRLTSRRICPKCGRIYNMIFNPPKEDELCDDCKVKLVQRDDDKEETVRHRYKVYLEKTQPVIDYYGKKGILKRVDGTIGIDTVVAEVLKIIGWSDK

SEQ ID NO: 49 - DNA, 693 bp, synthetic construct
  misc_feature 1..693: note = Variant of adenylate kinase
  source 1..693: mol_type = other DNA
atgcaccatcatcaccatcacgggggctccggcatgatggcatatctggtgctgttaggtccgccgggcgcgggaaaaggtacccaagcgaaacgcattcaggaaaagactggcatcccacatattagcacgggcgatatcttccgtgacatcgtcaagaaagagaacgatgaactgggcaagaagattaaagaaatcatggagaaaggtgaactcgttccagatgaactggtgaatgaggtagtaaaacgccgcctgtcggagaaagactgcgaaaaaggctttattttggatggttatccgcgtaccgttgctcaagcggaattcctggacagttttcttgaatcccagaacaaacagttgacagccgccgtgctgttcaaaatccccgaagatgttgttgtgcaacgtttaacctctcgccgtatctgtccgaaatgcgggcgtatctacaatatgatttcactgccaccaaaagaagacgagctgtgtgacgattgcaaagtcaaattagtacagcgtgacgatgataaggaagaaacggttcgtcaccgctataaagtctaccttgagaagacccagccggtcattgactattatggcaagaaaggtattctcaaacgcgtagatgggacgatcggaatcgacaacgttgttgcagaagtcctgaagattattggttggagcgataag

SEQ ID NO: 50 - protein, 231 aa, synthetic construct
  REGION 1..231: note = Variant of adenylate kinase
MHHHHHHGGSGMMAYLVLLGPPGAGKGTQAKRIQEKTGIPHISTGDIFRDIVKKENDELGKKIKEIMEKGELVPDELVNEVVKRRLSEKDCEKGFILDGYPRTVAQAEFLDSFLESQNKQLTAAVLFKIPEDVVVQRLTSRRICPKCGRIYNMISLPPKEDELCDDCKVKLVQRDDDKEETVRHRYKVYLEKTQPVIDYYGKKGILKRVDGTIGIDNVVAEVLKIIGWSDK

SEQ ID NO: 51 - DNA, 693 bp, synthetic construct
  misc_feature 1..693: note = Variant of adenylate kinase
  source 1..693: mol_type = other DNA
atgcaccatcatcaccatcacgggggctccggcatgatggcatatctggtgtttttaggtccgccgggcgcgggaaaaggtacctacgccaaacgcattcaggaaaagactggcatcccacatattagcacgggcgatatcttccgtgacatcgtcaagaaagagaacgatgaactgggcaagaagattaaagaaatcatggagaaaggtgaactcgttccagatgaactggtgaataatgtagtaaaacgccgcctgtcggagaaagactgcgaaaaaggctttattttggatggttatccgcgtaccgttgctcaagcggaattcctggacagttttcttgaatcccagaacaaacagttgacagccgccgtgctgttcgatgtccccgaagatgttgttgtgcaacgtttaacctctcgccgcatctgtccgaaatgcgggcgtatctacaatatgatttcactgccaccaaaagaagacgagctgtgtgacgattgcaaagtcaaattagtacagcgtgatgatgataaggaagaaacggttcgtcaccgctataaagtctaccttgagaagacccagccggtcattgactattatggcaagaaaggtattctcaaacgcgtagatggcacgattggaatcgacaacgttgttgcagaagtcctgaagattattggttggagcgataag

SEQ ID NO: 52 - protein, 231 aa, synthetic construct
  REGION 1..231: note = Variant of adenylate kinase
MHHHHHHGGSGMMAYLVFLGPPGAGKGTYAKRIQEKTGIPHISTGDIFRDIVKKENDELGKKIKEIMEKGELVPDELVNNVVKRRLSEKDCEKGFILDGYPRTVAQAEFLDSFLESQNKQLTAAVLFDVPEDVVVQRLTSRRICPKCGRIYNMISLPPKEDELCDDCKVKLVQRDDDKEETVRHRYKVYLEKTQPVIDYYGKKGILKRVDGTIGIDNVVAEVLKIIGWSDK

SEQ ID NO: 53 - DNA, 693 bp, synthetic construct
  misc_feature 1..693: note = Variant of adenylate kinase
  source 1..693: mol_type = other DNA
atgcaccatcatcaccatcacgggggctccggcatgatggcatatctggtgtttttaggtccgccgggcgcgggaaaaggtacctacgccaaaaacattcaggaaaagactggcatcccacatattggtacgggcgatatcttccgtgacatcgtcaagaaagagaacgatgaactgggcaagaagattaaagaaatcatggagaaaggtgaactcgttccagatgaactggtgaatgaggtagtaaaacgccgcctgtcggagaaagactgcgaaaaaggctttattttggatggttatccgcgtaccgttgctcaagcggaattcctggacagttttcttgaatcccagaacaaacagttgacagccgccgtgctgttcgatgtccccgaagatgttgttgtgcaacgtatcaccagtcgccgcatctgtccgaaatgcgggcgtatctaccacatgatttcactgccaccaaaagaagacgagctgtgtgacgattgcaaagtcaaattagtacagcgtgatgatgataaggaagaaacggttcgtcaccgctataaagtctaccttaagaagacccagccggtcattgactattatggcaagaaaggtattctcaaacgcgtagatggcacgattccagtcgataacgttgttgcagaagtcctgaagattattggttggagcgataag

SEQ ID NO: 54 - protein, 231 aa, synthetic construct
  REGION 1..231: note = Variant of adenylate kinase
MHHHHHHGGSGMMAYLVFLGPPGAGKGTYAKNIQEKTGIPHIGTGDIFRDIVKKENDELGKKIKEIMEKGELVPDELVNEVVKRRLSEKDCEKGFILDGYPRTVAQAEFLDSFLESQNKQLTAAVLFDVPEDVVVQRITSRRICPKCGRIYHMISLPPKEDELCDDCKVKLVQRDDDKEETVRHRYKVYLKKTQPVIDYYGKKGILKRVDGTIPVDNVVAEVLKIIGWSDK

SEQ ID NO: 55 - DNA, 693 bp, synthetic construct
  misc_feature 1..693: note = Variant of adenylate kinase
  source 1..693: mol_type = other DNA
atgcaccatcatcaccatcacgggggctccggcatgatggcatatctggtgtttttaggtccgccgggcgcgggaaaaggtacctacgccaaacgcattcaggaaaagactggcatcccacatattagcacgggcgatatcttccgtgacatcgtcaagaaagagaacgatgaactgggcaagaagattaaagaaatcatggagaaaggtgaactcgttccagatgaactggtgaatgaggtagtaaaacgccgcctgtcggagaaagactgcgaaaaaggctttattttggatggttatccgcgtaccgttgctcaagcggaattcctggacagttttcttgaatcccagaacaaacagttgacagccgccgtgctgttcgatgtccccgaagatgttgttgtgcaacgtttaacctctcgccgcatctgtccgaaatgcgggcgtatctacaatatgatttcactgccaccaaaagaagacgagctgtgtgacgattgcaaagtcaaattagtacagcgtgatgatgataaggaagaaacggttcaacaccgctataaagtctaccttgagaagacccagccggtcattgactattatggcaagaaaggtattctcaaacgcgtagatggcacgattggaatcgacaacgttgttgcagaagtcctgaagattattggttggagcgataag

SEQ ID NO: 56 - protein, 231 aa, synthetic construct
  REGION 1..231: note = Variant of adenylate kinase
MHHHHHHGGSGMMAYLVFLGPPGAGKGTYAKRIQEKTGIPHISTGDIFRDIVKKENDELGKKIKEIMEKGELVPDELVNEVVKRRLSEKDCEKGFILDGYPRTVAQAEFLDSFLESQNKQLTAAVLFDVPEDVVVQRLTSRRICPKCGRIYNMISLPPKEDELCDDCKVKLVQRDDDKEETVQHRYKVYLEKTQPVIDYYGKKGILKRVDGTIGIDNVVAEVLKIIGWSDK

SEQ ID NO: 57 - DNA, 693 bp, synthetic construct
  misc_feature 1..693: note = Variant of adenylate kinase
  source 1..693: mol_type = other DNA
atgcaccatcatcaccatcacgggggctccggcatgatggcatatctggtgctgttaggtccgccgggcgcgggaaaaggtacctatgcgaaacgcattcaggaaaagactggcatcccacatattagcacgggcgatatcttccgtgacatcgtcaagaaagagaacgatgaactgggcaagaagattaaagaaatcatggagaaaggtgaactcgttccagatgaactggtgaatgaggtagtaaaacgccgcctgtcggagaaagactgcgaaaaaggctttattttggatggttatccgcgtaccgttgctcaagcggaattcctggacagttttcttgaatcccagaacaaacagttgacagccgccgtgctgttcgacgtccccgaagatgttgttgtgcaacgtttaacctctcgccgtatctgtccgaaatgcgggcgtatctacaatatgatttcactgccaccaaaagaagacgagctgtgtgacgattgcaaagtcaaattagtacagcgttcggatgataaggaagaaacggttcgtcaccgcctgaaagtctaccttgagaagacccagccggtcattgactattatggcaagaaaggtattctcaaacgcgtagatgggtcgcaaggaatcgacaacgttgttgcagaagtcctgaagattattggttggagcgataag

SEQ ID NO: 58 - protein, 231 aa, synthetic construct
  REGION 1..231: note = Variant of adenylate kinase
MHHHHHHGGSGMMAYLVLLGPPGAGKGTYAKRIQEKTGIPHISTGDIFRDIVKKENDELGKKIKEIMEKGELVPDELVNEVVKRRLSEKDCEKGFILDGYPRTVAQAEFLDSFLESQNKQLTAAVLFDVPEDVVVQRLTSRRICPKCGRIYNMISLPPKEDELCDDCKVKLVQRSDDKEETVRHRLKVYLEKTQPVIDYYGKKGILKRVDGSQGIDNVVAEVLKIIGWSDK

SEQ ID NO: 59 - DNA, 693 bp, synthetic construct
  misc_feature 1..693: note = Variant of adenylate kinase
  source 1..693: mol_type = other DNA
atgcaccatcatcaccatcacgggggctccggcatgatggcatatctggtgttcttaggtccgccgggcgcgggaaaaggtacctacgccaaacgcattcaggaaaagactggcatcccacatattagcacgggcgatatcttccgtgacatcgtcaagaaagagaacgatgaactgggcaagaagattaaagaaatcatggagaaaggtgaactcgttccagatgaactggtgaatgaggtagtaaaacgccgcctgtcggagaaagactgcgaaaaaggctttattttggatggttatccgcgtaccgttgctcaagcggaattcctggacagttttcttgaatcccagaacaaacagttgacagccgccgtgctgttcgacatccccgaagatgttgttgtgcaacgtttaacctctcgccgcatctgtccgaaatgcgggcgtatctacaatatgatttcactgccaccaaaagaagacgagctgtgtgacgattgcaaagtcaaattagtacagcgtgatgatgataaggaagaaacggttcgtcaccgctataaagtctaccttgagaagacccagccggtcattgactattatggcaagaaaggtattctcaaacgcgtagatggcacgattggaatcgacaacgttgttgcagaagtcctgaagattattggttggagcgataag

SEQ ID NO: 60 - protein, 231 aa, synthetic construct
  REGION 1..231: note = Variant of adenylate kinase
MHHHHHHGGSGMMAYLVFLGPPGAGKGTYAKRIQEKTGIPHISTGDIFRDIVKKENDELGKKIKEIMEKGELVPDELVNEVVKRRLSEKDCEKGFILDGYPRTVAQAEFLDSFLESQNKQLTAAVLFDIPEDVVVQRLTSRRICPKCGRIYNMISLPPKEDELCDDCKVKLVQRDDDKEETVRHRYKVYLEKTQPVIDYYGKKGILKRVDGTIGIDNVVAEVLKIIGWSDK

SEQ ID NO: 61 - DNA, 693 bp, synthetic construct
  misc_feature 1..693: note = Variant of adenylate kinase
  source 1..693: mol_type = other DNA
atgcaccatcatcaccatcacgggggctccggcatgatggcatatctggtgctgttaggtccgccgggcgcgggaaaaggtacccaatcgaaacgcattcaggaaaagactggcatcccacatattagcacgggcgatatcttccgtgacatcgtcaagaaagagaacgatgaactgggcaagaagattaaaaaaatcatggagaaaggtgaactcgttccagatgaactggtgaatgaggtagtaaaacgccgcctgtcggagaaagactgcgaaaaaggctttattttggatggttatccgcgtaccgttgctcaagcggaattcctggacagttttcttgaatcccagaacaaacagttgacagccgccgtgctgttcgacatccccgaagatgttgttgtgcaacgtttaacctctcgcctgatctgtccgaaatgcgggcgtagctacaatatgatttcactgccaccaaaagaagacgagctgtgtgacgattgcaaagtcaaattagtacagcgtgatgatgataaggaagaaacggttcgtcaccgcctgaaagtctaccttgagaagacccagccggtcattgactattatggcaagaaaggtattctcaaacgcgtagatggcacgattggaatcgacaacgttgttgcagaagtcctgaagattattggttggagcgataag

SEQ ID NO: 62 - protein, 231 aa, synthetic construct
  REGION 1..231: note = Variant of adenylate kinase
MHHHHHHGGSGMMAYLVLLGPPGAGKGTQSKRIQEKTGIPHISTGDIFRDIVKKENDELGKKIKKIMEKGELVPDELVNEVVKRRLSEKDCEKGFILDGYPRTVAQAEFLDSFLESQNKQLTAAVLFDIPEDVVVQRLTSRLICPKCGRSYNMISLPPKEDELCDDCKVKLVQRDDDKEETVRHRLKVYLEKTQPVIDYYGKKGILKRVDGTIGIDNVVAEVLKIIGWSDK

SEQ ID NO: 63 - DNA, 693 bp, synthetic construct
  misc_feature 1..693: note = Variant of adenylate kinase
  source 1..693: mol_type = other DNA
atgcaccatcatcaccatcacgggggctccggcatgatggcatatctggtgttcttaggtccgccgggcgcgggaaaaggtacctatgcgaaacgcattcaggaaaagactggcatcccacatattagcacgggcgatatcttccgtgacatcgtcaagaaagagaacgatgaactgggcaagaagattaaagaaatcatggagaaaggtgaactcgttccagatgaactggtgaatgaggtagtaaaacgccgcctgtcggagaaagactgcgaaaaaggctttattttggatggttatccgcgtaccgttgctcaagcggaattcctggacagttttcttgaatcccagaacaaacagttgacagccgccgtgctgctggatgtccccgaagatgttgttgtgcaacgtttaacctctcgcctgatctgtccgaaatgcgggcgtatctacaatatgatttcactgccaccaaaagaagacgagctgtgtgacgattgcaaagtcaaattagtacagcgtgatgatgataaggaagaaacggttcgtcaccgctataaagtctaccttgagaagacccagccggtcattgactattatggcaagaaaggtattctcaaacgcgtagatgggtcgcaaggaatcgacaacgttgttgcagaagtcctgaagattattggttggagcgataag

SEQ ID NO: 64 - protein, 231 aa, synthetic construct
  REGION 1..231: note = Variant of adenylate kinase
MHHHHHHGGSGMMAYLVFLGPPGAGKGTYAKRIQEKTGIPHISTGDIFRDIVKKENDELGKKIKEIMEKGELVPDELVNEVVKRRLSEKDCEKGFILDGYPRTVAQAEFLDSFLESQNKQLTAAVLLDVPEDVVVQRLTSRLICPKCGRIYNMISLPPKEDELCDDCKVKLVQRDDDKEETVRHRYKVYLEKTQPVIDYYGKKGILKRVDGSQGIDNVVAEVLKIIGWSDK

SEQ ID NO: 65 - DNA, 693 bp, synthetic construct
  misc_feature 1..693: note = Variant of adenylate kinase
  source 1..693: mol_type = other DNA
atgcaccatcatcaccatcacgggggctccggcatgatggcatatctggtgttcttaggtccgccgggcgcgggaaaaggtacctattcgaaacgcattcaggaaaagactggcatcccacatattagcacgggcgatatcttccgtgacatcgtcaagaaagagaacgatgaactgggcaagaagattaaaaaaatcatggagaaaggtgaactcgttccagatgaactggtgaatgaggtagtaaaacgccgcctgtcggagaaagactgcgaaaaaggctttattttggatggttatccgcgtaccgttgctcaagcggaattcctggacagttttcttgaatcccagaacaaacagttgacagccgccgtgctgttcgatgtccccgaagatgttgttgtgcaacgtttaacctctcgcctgatctgtccgaaatgcgggcgtatctacaatatgatttcactgccaccaaaagaagacgagctgtgtgacgattgcaaagtcaaattagtacagcgtgacgatgataaggaagaaacggttcgtcaccgctataaagtctaccttgagaagacccagccggtcattgactattatggcaagaaaggtattctcaaacgcgtagatggcacgattggaatcgacaacgttgttgcagaaattctgaagattattggttggagcgataag

SEQ ID NO: 66 - protein, 231 aa, synthetic construct
  REGION 1..231: note = Variant of adenylate kinase
MHHHHHHGGSGMMAYLVFLGPPGAGKGTYSKRIQEKTGIPHISTGDIFRDIVKKENDELGKKIKKIMEKGELVPDELVNEVVKRRLSEKDCEKGFILDGYPRTVAQAEFLDSFLESQNKQLTAAVLFDVPEDVVVQRLTSRLICPKCGRIYNMISLPPKEDELCDDCKVKLVQRDDDKEETVRHRYKVYLEKTQPVIDYYGKKGILKRVDGTIGIDNVVAEILKIIGWSDK

SEQ ID NO: 67 - DNA, 693 bp, synthetic construct
  misc_feature 1..693: note = Variant of adenylate kinase
  source 1..693: mol_type = other DNA
atgcaccatcatcaccatcacgggggctccggcatgatggcatatctggtgtttttaggtccgccgggcgcgggaaaaggtacctacgccaaacgcattcaggaaaagactggcatctgtcatattggtacgggcgatatcttccgtgacatcgtaaagaaagagaacgatgaactgggcaagaagattaaagaaatcatggagaaaggtgaactcgttccagatgaactggtgaatgaggtagtaaaacgccgcctgtcggagaaagactgcgaaaaaggctttattttggatggttatccgcgtaccgttgctcaagcggaattcctggacagttttcttgaatcccagaacaaacagttgacagccgccgtgctgttcgatgtccccgaagatgtggtggtgcaacgtttaacctctcgccgcatctgtccgaaatgcgggcgtatctacaatatgatttcactgccaccaaaagaagacgagctgtgtgacgattgcaaagtcaaattagtacagcgtgatgatgataaggaagaaacggttcgtcaccgctataaagtctaccttgagaagacccagccggtcattgactattatggcaagaaaggtattctcaaacgcgtagatggcacgattggcgtcgataacgttgttgcagaagtcctgaagattattggttggagcgataag

SEQ ID NO: 68 - protein, 231 aa, synthetic construct
  REGION 1..231: note = Variant of adenylate kinase
MHHHHHHGGSGMMAYLVFLGPPGAGKGTYAKRIQEKTGICHIGTGDIFRDIVKKENDELGKKIKEIMEKGELVPDELVNEVVKRRLSEKDCEKGFILDGYPRTVAQAEFLDSFLESQNKQLTAAVLFDVPEDVVVQRLTSRRICPKCGRIYNMISLPPKEDELCDDCKVKLVQRDDDKEETVRHRYKVYLEKTQPVIDYYGKKGILKRVDGTIGVDNVVAEVLKIIGWSDK

SEQ ID NO: 69 - DNA, 693 bp, synthetic construct
  misc_feature 1..693: note = Variant of adenylate kinase
  source 1..693: mol_type = other DNA
atgcaccatcatcaccatcacgggggctccggcatgatggcatatctggtgtttttaggtccgccgggcgcgggaaaaggtacctacgccaaacgcattcaggaaaagactggcatcccacatattagtacgggcgatatcttccgtgacatcgtcaagaaagagaacgatgaactgggcaagaagattaaagaaatcatggagaaaggtgaactcgttccagatgaactggtgaatgaggtagtaaaacgccgcctgtcggagaaagactgcgaaaaaggctttattttggatggttatccgcgtaccgttgctcaagcggaattcctggacagttttcttgaatcccagaacaaacagttgacagccgccgtgctgttcgatgtccccgaagatgttgttgttgcccgtttaacctctcgccgcatctgtccgaaatgcgggcgtatctacaatatgatttcactgccaccaaaagaagacgagctgtgtgacgattgcaaagtcaaattagtacagcgtgatgatgataaggaagaaacggttcgtcaccgctataaagtctaccttgagaagacccagccggtcattgactattatggcaagaaaggtattctcaaacgcgtagatggcacgattggaatcgacaacgttgttgcagaagtcctgaagattattggttggagcgataag

SEQ ID NO: 70 - protein, 231 aa, synthetic construct
  REGION 1..231: note = Variant of adenylate kinase
MHHHHHHGGSGMMAYLVFLGPPGAGKGTYAKRIQEKTGIPHISTGDIFRDIVKKENDELGKKIKEIMEKGELVPDELVNEVVKRRLSEKDCEKGFILDGYPRTVAQAEFLDSFLESQNKQLTAAVLFDVPEDVVVARLTSRRICPKCGRIYNMISLPPKEDELCDDCKVKLVQRDDDKEETVRHRYKVYLEKTQPVIDYYGKKGILKRVDGTIGIDNVVAEVLKIIGWSDK

SEQ ID NO: 71 - DNA, 693 bp, synthetic construct
  misc_feature 1..693: note = Variant of adenylate kinase
  source 1..693: mol_type = other DNA
atgcaccatcatcaccatcacgggggctccggcatgatggcatatctggtgttcttaggtccgccgggcgcgggaaaaggtacccaagcgaaacgcattcaggaaaagactggcatcccacatattagcacgggcgatatcttccgtgacatcgtcaagaaagagaacgatgaactgggcaagaagattaaagaaatcatggagaaaggtgaactcgttccagatgaactggtgaatgaggtagtaaaacgccgcctgtcggagaaagactgcgaaaaaggctttattttggatggttatccgcgtaccgttgctcaagcggaattcctggacagttttcttgaatcccagaacaaacagttgacagccgccgtgctgttcgacgtccccgaagatgttgttgtgcaacgtttaacctctcgccgtatctgtccgaaatgcgggcgtagctacaatatgatttcactgccaccaaaagaagacgagctgtgtgacgattgcaaagtcaaattagtacagcgtgatgatgataaggaagaaacggttcgtcaccgctataaagtctaccttgagaagacccagccggtcattgactattatggcaagaaaggtattctcaaacgcgtagatgcgtcgcaaggaatcgacaacgttgttgcagatgttctgaagattattggttggagcgataag

SEQ ID NO: 72 - protein, 231 aa, synthetic construct
  REGION 1..231: note = Variant of adenylate kinase
MHHHHHHGGSGMMAYLVFLGPPGAGKGTQAKRIQEKTGIPHISTGDIFRDIVKKENDELGKKIKEIMEKGELVPDELVNEVVKRRLSEKDCEKGFILDGYPRTVAQAEFLDSFLESQNKQLTAAVLFDVPEDVVVQRLTSRRICPKCGRSYNMISLPPKEDELCDDCKVKLVQRDDDKEETVRHRYKVYLEKTQPVIDYYGKKGILKRVDASQGIDNVVADVLKIIGWSDK

SEQ ID NO: 73 - DNA, 693 bp, synthetic construct
  misc_feature 1..693: note = Variant of adenylate kinase
  source 1..693: mol_type = other DNA
atgcaccatcatcaccatcacgggggctccggcatgatggcatatctggtgtttttaggtccgccgggcgcgggaaaaggtacctacgccaaacgtattcaggaaaagactggcatcccacatattggtacgggcgatatcttccgtgacatcgtaaagaaagagaacgatgaactgggcaagaagattaaagaaatcatggagaaaggtgaactcgttccagatgaactggtgaatgaggtagtaaaacgccgcctgtcggagaaagactgcgaaaaaggctttattttggatggttatccgcgtaccgttgctcaagcggaattcctggaaagttttcttgaatcccagaacaaacagttgacagccgccgtgctgttcgatgtccccgaagatgttgttgttgcccgtttaacctctcgccgcatctgtccgaaatgcgggcgtatctacaatatgatttcactgccaccaaaagaagacgagctgtgtgacgattgcaaagtcaaattagtacagcgtgatgatgataaggaagaaacggttcgtcaccgctataaagtctaccttgagaagacccagccggtcattgactattatggcaagaaaggtattctcaaacgcgtagatggcacgattggaatcgacaacgtttgggcagaagtcctgaagattattggttggagcgataag

SEQ ID NO: 74 - protein, 231 aa, synthetic construct
  REGION 1..231: note = Variant of adenylate kinase
MHHHHHHGGSGMMAYLVFLGPPGAGKGTYAKRIQEKTGIPHIGTGDIFRDIVKKENDELGKKIKEIMEKGELVPDELVNEVVKRRLSEKDCEKGFILDGYPRTVAQAEFLESFLESQNKQLTAAVLFDVPEDVVVARLTSRRICPKCGRIYNMISLPPKEDELCDDCKVKLVQRDDDKEETVRHRYKVYLEKTQPVIDYYGKKGILKRVDGTIGIDNVWAEVLKIIGWSDK

SEQ ID NO: 75 - DNA, 693 bp, synthetic construct
  misc_feature 1..693: note = Variant of adenylate kinase
  source 1..693: mol_type = other DNA
atgcaccatcatcaccatcacgggggctccggcatgatggcatatctggtgtttttaggtccgccgggcgcgggaaaaggtacctacgccaaacgcattcaggaaaagactggcatcccacatattagcacgggcgatatcttccgtgacatcgtcaagaaagagaacgatgaactgggcaagaagattaaagaaatcatggagaaaggtgaactcgttccagatgaactggtgaatgaggtagtaaaacgccgcctgtcggagaaagactgcgaaaaaggctttattttggatggttatccgcgtaccgttgctcaagcggaattcctggacagttttcttgaatcccagaacaaacagttgacagccgccgtgctgttcgatgtccccgaagatgttgttgtgcaacgtttaacctctcgccgcatctgtccgaaatgcgggcgtatctacaatatgatttcactgccaccaaaagaagacgagctgtgtgacgattgcaaagtcaaattagtacagcgtgatgatgataaggaagaaacggttcgtcaccgctataaagtctaccttgagaagacccagccggtcattgactattatggcaagaaaggtattctcaaacgcgtagatggcacgattggaatcgacaacgttgttgcagaagtcctgaagattctgggttggagcgataag

SEQ ID NO: 76 - protein, 231 aa, synthetic construct
  REGION 1..231: note = Variant of adenylate kinase
MHHHHHHGGSGMMAYLVFLGPPGAGKGTYAKRIQEKTGIPHISTGDIFRDIVKKENDELGKKIKEIMEKGELVPDELVNEVVKRRLSEKDCEKGFILDGYPRTVAQAEFLDSFLESQNKQLTAAVLFDVPEDVVVQRLTSRRICPKCGRIYNMISLPPKEDELCDDCKVKLVQRDDDKEETVRHRYKVYLEKTQPVIDYYGKKGILKRVDGTIGIDNVVAEVLKILGWSDK

SEQ ID NO: 77 - DNA, 693 bp, synthetic construct
  misc_feature 1..693: note = Variant of adenylate kinase
  source 1..693: mol_type = other DNA
atgcaccatcatcaccatcacgggggctccggcatgatggcatatctggtgtttttaggtccgccgggcgcgggaaaaggtacctacgccaaacgcattcaggaaaagactggcatcccacatattagcacgggcgatatcttccgtgacatcgtcaagaaagagaacgatgaactgggcaagaagattaaagaaatcatggagaaaggtgaactcgttccagatgaactggtgaatgaggtagtaaaacgccgcctgtcgaacaaagactgcgaaaaaggctttattttggatggttatccgcgtaccgttgctcaagcggaattcctggacagttttcttgaatcccagaacaaacagttgacagccgccgtgctgttcgatgtccccgaagatgttgttgtgcaacgtttaacctctcgccgcatctgtccgaaatgcgggcgtatctacaatatgatttcactgccaccaaaagaagacgagctgtgtgacgattgcaaagtcaaattagtacagcgtgatgatgataaggaagaaacggttcgtcaccgctataaagtctaccttgagaagacccagccggtcattgactattatggcaagaaaggtattctcaaacgcgtagatggcacgattggaatcgacaacgttgttgcagaagtcctgaagattattggttggagcgataag

SEQ ID NO: 78 - protein, 231 aa, synthetic construct
  REGION 1..231: note = Variant of adenylate kinase
MHHHHHHGGSGMMAYLVFLGPPGAGKGTYAKRIQEKTGIPHISTGDIFRDIVKKENDELGKKIKEIMEKGELVPDELVNEVVKRRLSNKDCEKGFILDGYPRTVAQAEFLDSFLESQNKQLTAAVLFDVPEDVVVQRLTSRRICPKCGRIYNMISLPPKEDELCDDCKVKLVQRDDDKEETVRHRYKVYLEKTQPVIDYYGKKGILKRVDGTIGIDNVVAEVLKIIGWSDK

SEQ ID NO: 79 - DNA, 693 bp, synthetic construct
  misc_feature 1..693: note = Variant of adenylate kinase
  source 1..693: mol_type = other DNA
atgcaccatcatcaccatcacgggggctccggcatgatggcatatctggtgtttttaggtccgccgggcgcgggaaaaggtacctacgccaaacgcattcaggaaaagactggcatcccacatattagcacgggcgatatcttccgtgacatcgtcaagaaagagaacgatgaactgggcaagaagattaaagaaatcatggagaaaggtgaactcgttccagatgaactggtgaatgaggtagtaaaacgccgcctgtcggagaaagactgcgaaaaaggctttattttggatggttatccgcgtaccgttgctcaagcggaattcctggacagttttcttgaatcccagaacaaacagttgacagccgccgtgctgttcgatgtccccgaagatgttgttgtgcaacgtctgaccggtcgccgcatctgtccgaaatgcgggcgtatctacaatatgatttcactgccaccaaaagaagacgagctgtgtgacgattgcaaagtcaaattagtacagcgtgatgatgataaggaagaaacggttcgtcaccgctataaagtctaccttgagaagacccagccggtcattgactattatggcaagaaaggtattctcaaacgcgtagatggcacgattggcgtcgctaacgttgttgcagaagtcctgaagattattggttggagcgataag

SEQ ID NO: 80 - protein, 231 aa, synthetic construct
  REGION 1..231: note = Variant of adenylate kinase
MHHHHHHGGSGMMAYLVFLGPPGAGKGTYAKRIQEKTGIPHISTGDIFRDIVKKENDELGKKIKEIMEKGELVPDELVNEVVKRRLSEKDCEKGFILDGYPRTVAQAEFLDSFLESQNKQLTAAVLFDVPEDVVVQRLTGRRICPKCGRIYNMISLPPKEDELCDDCKVKLVQRDDDKEETVRHRYKVYLEKTQPVIDYYGKKGILKRVDGTIGVANVVAEVLKIIGWSDK

SEQ ID NO: 81 - DNA, 693 bp, synthetic construct
  misc_feature 1..693: note = Variant of adenylate kinase
  source 1..693: mol_type = other DNA
atgcaccatcatcaccatcacgggggctccggcatgatggcatatctggtgtttttaggtccgccgggcgcgggaaaaggtacctacgccaaaaacattcaggaaaagactggcatcccacatattagcacgggcgatatcttccgtgacatcgtcaagaaagagaacgatgaactgggcaagaagattaaagaaatcatggagaaaggtgaactcgttccagatgaactggtgaatgaggtagtaaaacgccgcctgtcggagaaagactgcgaaaaaggctttattttggatggttatccgcgtaccgttgctcaagcggaattcctggacagttttcttgaatcccagaacaaacagttgacagccgccgtgctgttcgatgtccccgaagatctgctggtgcaacgtttaacctctcgccgcatctgtccgaaatgcgggcgtatctacaacatgatttcactgccaccaaaagaagacgagctgtgtgacgattgcaaagtcaaattagtacagcgtgatgatgataaggaagaaacggttcgtcaccgctataaagtctaccttgagaagacccagccggtcattgactattatggcaagaaaggtattctcaaacgcgtagatggcacgattggaatcgacaacgttgttgcagaagtcctgaagattattggttggagcgataag

SEQ ID NO: 82 - protein, 231 aa, synthetic construct
  REGION 1..231: note = Variant of adenylate kinase
MHHHHHHGGSGMMAYLVFLGPPGAGKGTYAKNIQEKTGIPHISTGDIFRDIVKKENDELGKKIKEIMEKGELVPDELVNEVVKRRLSEKDCEKGFILDGYPRTVAQAEFLDSFLESQNKQLTAAVLFDVPEDLLVQRLTSRRICPKCGRIYNMISLPPKEDELCDDCKVKLVQRDDDKEETVRHRYKVYLEKTQPVIDYYGKKGILKRVDGTIGIDNVVAEVLKIIGWSDK

SEQ ID NO: 83 - DNA, 693 bp, synthetic construct
  misc_feature 1..693: note = Variant of adenylate kinase
  source 1..693: mol_type = other DNA
atgcaccatcatcaccatcacgggggctccggcatgatggcatatctggtgctgttaggtccgccgggcgcgggaaaaggtacccaagcgaaacgcattcaggaaaagactggcatcccacatattagcacgggcgatatcttccgtgacatcgtcaagaaagagaacgatgaactgggcaagaagattaaagaaatcatggagaaaggtgaactcgttccagatgaactggtgaatgaggtagtaaaacgccgcctgtcggagaaagactgcgaaaaaggctttattttggatggttatccgcgtaccgttgctcaagcggaattcctggacagttttcttgaatcccagaacaaacagttgacagccgccgtgctgttcaaagtccccgaagatgttgttgtgcaacgtttaacctctcgccgcatctgtccgaaatgcgggcgtatctacaatatgatttcactgccaccaaaagaagacgagctgtgtgacgattgcaaagtcaaattagtacagcgtgatgatgataaggaagaaacggttcgtcaccgcctgaaagtctaccttgagaagacccagccggtcattgactattatggcaagaaaggtattctcaaacgcgtagatggcacgattggaatcgacaacgttgttgcagaagtcctgaagattattggttggagcgataag

SEQ ID NO: 84 - protein, 231 aa, synthetic construct
  REGION 1..231: note = Variant of adenylate kinase
MHHHHHHGGSGMMAYLVLLGPPGAGKGTQAKRIQEKTGIPHISTGDIFRDIVKKENDELGKKIKEIMEKGELVPDELVNEVVKRRLSEKDCEKGFILDGYPRTVAQAEFLDSFLESQNKQLTAAVLFKVPEDVVVQRLTSRRICPKCGRIYNMISLPPKEDELCDDCKVKLVQRDDDKEETVRHRLKVYLEKTQPVIDYYGKKGILKRVDGTIGIDNVVAEVLKIIGWSDK

SEQ ID NO: 85 - DNA, 690 bp, synthetic construct
  misc_feature 1..690: note = Variant of adenylate kinase
  source 1..690: mol_type = other DNA
atgcaccatcatcaccatcacgggggctccggcatgatggcatatctggtgttcttaggtccgccgggcgcgggaaaaggtacccaatcgaaacgcattcaggaaaagactggcatcccacatattagcacgggcgatatcttccgtgacatcgtcaagaaagagaacgatgaactgggcaagaagattaaagaaatcatggagaaaggtgaactcgttccagatgaactggtgaatgaggtagtaaaacgccgcctgtcggagaaagactgcgaaaaaggctttattttggatggtgttcgtaccgttgctcaagcggaattcctggacagttttcttgaatcccagaacaaacagttgacagccgccgtgctgttcaaagtccccgaagatgttgttgtgcaacgtttaacctctcgcctgatctgtccgaaatgcgggcgtatctacaatatgatttcactgccaccaaaagaagacgagctgtgtgacgattgcaaagtcaaattagtacagcgtgatgatgataaggaagaaacggttcgtcaccgcctgaaagtctaccttgagaagacccagccggtcattgactattatggcaagaaaggtattctcaaacgcgtagatgggtcgcaaggaatcgacaacgttgttgcagaagtcctgaagattattggttggagcgataag

SEQ ID NO: 86 - protein, 230 aa, synthetic construct
  REGION 1..230: note = Variant of adenylate kinase
MHHHHHHGGSGMMAYLVFLGPPGAGKGTQSKRIQEKTGIPHISTGDIFRDIVKKENDELGKKIKEIMEKGELVPDELVNEVVKRRLSEKDCEKGFILDGVRTVAQAEFLDSFLESQNKQLTAAVLFKVPEDVVVQRLTSRLICPKCGRIYNMISLPPKEDELCDDCKVKLVQRDDDKEETVRHRLKVYLEKTQPVIDYYGKKGILKRVDGSQGIDNVVAEVLKIIGWSDK

SEQ ID NO: 87 - DNA, 693 bp, synthetic construct
  misc_feature 1..693: note = Variant of adenylate kinase
  source 1..693: mol_type = other DNA
atgcaccatcatcaccatcacgggggctccggcatgatggcatatctggtgttcttaggtccgccgggcgcgggaaaaggtacccaatcgaaacgcattcaggaaaagactggcatcccacatattagcacgggcgatatcttccgtgacatcgtcaagaaagagaacgatgaactgggcaagaagattaaagaaatcatggagaaaggtgaactcgttccagatgaactggtgaatgaggtagtaaaacgccgcctgtcggagaaagactgcgaaaaatcgtttattttggatggttatccgcgtaccgttgctcaagcggaattcctggacagttttcttgaatcccagaacaaacagttgacagccgccgtgctgttcaaagtccccgaagatgttgttgtgcaacgtttaacctctcgcctgatctgtccgaaatgcgggcgtatctacaatatgatttcactgccaccaaaagaagacgagctgtgtgacgattgcaaagtcaaattagtacagcgtgatgatgataaggaagaaacggttcgtcaccgcctgaaagtctaccttgagaagacccagccggtcattgactattatggcaagaaaggtattctcaaacgcgtagatgggtcgcaaggaatcgacaacgttgttgcagaagtcctgaagattattggttggagcgataag

SEQ ID NO: 88 - protein, 231 aa, synthetic construct
  REGION 1..231: note = Variant of adenylate kinase
MHHHHHHGGSGMMAYLVFLGPPGAGKGTQSKRIQEKTGIPHISTGDIFRDIVKKENDELGKKIKEIMEKGELVPDELVNEVVKRRLSEKDCEKSFILDGYPRTVAQAEFLDSFLESQNKQLTAAVLFKVPEDVVVQRLTSRLICPKCGRIYNMISLPPKEDELCDDCKVKLVQRDDDKEETVRHRLKVYLEKTQPVIDYYGKKGILKRVDGSQGIDNVVAEVLKIIGWSDK

SEQ ID NO: 89 - DNA, 693 bp, synthetic construct
  misc_feature 1..693: note = Variant of adenylate kinase
  source 1..693: mol_type = other DNA
atgcaccatcatcaccatcacgggggctccggcatgatggcatatctggtgttcttaggtccgccgggcgcgggaaaaggtacccaatcgaaacgcattcaggaaaagactggcatcccacatattagcacgggcgatatcttccgtgacatcgtcaagaaagagaacgatgaactgggcaagaagattaaagaaatcatggagaaaggtgaactcgttccagatgaactggtgaatgaggtagtaaaacgccgcctgtcggagaaagactgcgaaaaaggctttattttggatggttatccgcgtaccgttgctcaagcggaattcctggacagttttcttgaatcccagaacaaacagttgacagccgccgtgctgttcaaagtccccgaagatgttgttgtgcaacgtttaacctctcgcctgatctgtccgaaatgcgggcgtatctacaatatgatttcactgccaccaaaagaagacgagctgtgtgacgattgcaaagtcaaattagtacagcgtgatgatgataagctggaaacggttcgtcaccgcctgaaagtctaccttgagaagacccagccggtcattgactattatggcaagaaaggtattctcaaacgcgtagatgggtcgcaaggaatcgacaacgttgttgcagaagtcctgaagattattggttggagcgataag

SEQ ID NO: 90 - protein, 231 aa, synthetic construct
  REGION 1..231: note = Variant of adenylate kinase
MHHHHHHGGSGMMAYLVFLGPPGAGKGTQSKRIQEKTGIPHISTGDIFRDIVKKENDELGKKIKEIMEKGELVPDELVNEVVKRRLSEKDCEKGFILDGYPRTVAQAEFLDSFLESQNKQLTAAVLFKVPEDVVVQRLTSRLICPKCGRIYNMISLPPKEDELCDDCKVKLVQRDDDKLETVRHRLKVYLEKTQPVIDYYGKKGILKRVDGSQGIDNVVAEVLKIIGWSDK

SEQ ID NO: 91 - DNA, 693 bp, synthetic construct
  misc_feature 1..693: note = Variant of adenylate kinase
  source 1..693: mol_type = other DNA
atgcaccatcatcaccatcacgggggctccggcatgatggcatatctggtgttcttaggtccgccgggcgcgggaaaaggtacccaatcgaaacgcattcaggaaaagactggcatcccacatattagcacgggcgatatcttccgtgacatcgtcaagaaagagaacgatgaactgggcaagaagattaaagaaatcatggagaaaggtgaactcgttccagatgaactggtgaatgaggtagtaaaacgccgcctgtcggagaaagactgcgaaaaaggctttattttggatggttatccgcgtaccgttgctcaagcggaattcctggacagttttcttgaatcccagaacaaacagttgacagccgccgtgctgttcaaagtccccgaagatgttgttgtgcaacgtttaacctctcgcctgatctgtccgaaatgcgggcgtatctacaatatgatttcactgccaccaaaagaagacgagctgtgtgacgattgcaaagtcaaattagtacagcgtgatgatgataaggaagaaacggttcgtcaccgcctgaaagtctaccttgagaagacccagccggtcattgggtattatggcaagaaaggtattctcaaacgcgtagatgggtcgcaaggaatcgacaacgttgttgcagaagtcctgaagattattggttggagcgataag

SEQ ID NO: 92 - protein, 231 aa, synthetic construct
  REGION 1..231: note = Variant of adenylate kinase
MHHHHHHGGSGMMAYLVFLGPPGAGKGTQSKRIQEKTGIPHISTGDIFRDIVKKENDELGKKIKEIMEKGELVPDELVNEVVKRRLSEKDCEKGFILDGYPRTVAQAEFLDSFLESQNKQLTAAVLFKVPEDVVVQRLTSRLICPKCGRIYNMISLPPKEDELCDDCKVKLVQRDDDKEETVRHRLKVYLEKTQPVIGYYGKKGILKRVDGSQGIDNVVAEVLKIIGWSDK

SEQ ID NO: 93 - DNA, 693 bp, synthetic construct
  misc_feature 1..693: note = Variant of adenylate kinase
  source 1..693: mol_type = other DNA
atgcaccatcatcaccatcacgggggctccggcatgatggcatatctggtgttcttaggtccgccgggcgcgggaaaaggtacccaatcgaaacgcattcaggaaaagactggcatcccacatattagcacgggcgatatcttccgtgacatcgtcaagaaagagaacccggaactgggcaagaagattaaagaaatcatggagaaaggtgaactcgttccagatgaactggtgaatgaggtagtaaaacgccgcctgtcggagaaagactgcgaaaaaggctttattttggatggttatccgcgtaccgttgctcaagcggaattcctggacagttttcttgaatcccagaacaaacagttgacagccgccgtgctgttcaaagtccccgaagatgttgttgtgcaacgtttaacctctcgcctgatctgtccgaaatgcgggcgtatctacaatatgatttcactgccaccaaaagaagacgagctgtgtgacgattgcaaagtcaaattagtacagcgtgatgatgataaggaagaaacggttcgtcaccgcctgaaagtctaccttgagaagacccagccggtcattgactattatggcaagaaaggtattctcaaacgcgtagatgggtcgcaaggaatcgacaacgttgttgcagaagtcctgaagattattggttggagcgataag

SEQ ID NO: 94 - protein, 231 aa, synthetic construct
  REGION 1..231: note = Variant of adenylate kinase
MHHHHHHGGSGMMAYLVFLGPPGAGKGTQSKRIQEKTGIPHISTGDIFRDIVKKENPELGKKIKEIMEKGELVPDELVNEVVKRRLSEKDCEKGFILDGYPRTVAQAEFLDSFLESQNKQLTAAVLFKVPEDVVVQRLTSRLICPKCGRIYNMISLPPKEDELCDDCKVKLVQRDDDKEETVRHRLKVYLEKTQPVIDYYGKKGILKRVDGSQGIDNVVAEVLKIIGWSDK

SEQ ID NO: 95 - DNA, 693 bp, synthetic construct
  misc_feature 1..693: note = Variant of adenylate kinase
  source 1..693: mol_type = other DNA
atgcaccatcatcaccatcacgggggctccggcatgatggcatatctggtgttcttaggtccgccgggcgcgggaaaaggtacccaatcgaaacgcattcaggaaaagactggcatcccacatattagcacgggcgatatcttccgtgacatcgtcaagaaagagaacgatgaactgggcaagaagattaaagaaatcatggagaaaggtgaactcgttccagatgaactggggaatgaggtagtaaaacgccgcctgtcggagaaagactgcgaaaaaggctttattttggatggttatccgcgtaccgttgctcaagcggaattcctggacagttttcttgaatcccagaacaaacagttgacagccgccgtgctgttcaaagtccccgaagatgttgttgtgcaacgtttaacctctcgcctgatctgtccgaaatgcgggcgtatctacaatatgatttcactgccaccaaaagaagacgagctgtgtgacgattgcaaagtcaaattagtacagcgtgatgatgataaggaagaaacggttcgtcaccgcctgaaagtctaccttgagaagacccagccggtcattgactattatggcaagaaaggtattctcaaacgcgtagatgggtcgcaaggaatcgacaacgttgttgcagaagtcctgaagattattggttggagcgataag

SEQ ID NO: 96 - protein, 231 aa, synthetic construct
  REGION 1..231: note = Variant of adenylate kinase
MHHHHHHGGSGMMAYLVFLGPPGAGKGTQSKRIQEKTGIPHISTGDIFRDIVKKENDELGKKIKEIMEKGELVPDELGNEVVKRRLSEKDCEKGFILDGYPRTVAQAEFLDSFLESQNKQLTAAVLFKVPEDVVVQRLTSRLICPKCGRIYNMISLPPKEDELCDDCKVKLVQRDDDKEETVRHRLKVYLEKTQPVIDYYGKKGILKRVDGSQGIDNVVAEVLKIIGWSDK

SEQ ID NO: 97 - DNA, 693 bp, synthetic construct
  misc_feature 1..693: note = Variant of adenylate kinase
  source 1..693: mol_type = other DNA
atgcaccatcatcaccatcacgggggctccggcatgatggcatatctggtgttcttaggtccgccgggcgcgggaaaaggtacccaatcgaaacgcattcaggaaaagactggcatcccacatattagcacgggcgatatcttccgtgacatcgtcaagaaagagaacgatgaactgggcaagaagattaaagaaatcatgcgtaaaggtgaactcgttccagatgaactggtgaatgaggtagtaaaacgccgcctgtcggagaaagactgcgaaaaaggctttattttggatggttatccgcgtaccgttgctcaagcggaattcctggacagttttcttgaatcccagaacaaacagttgacagccgccgtgctgttcaaagtccccgaagatgttgttgtgcaacgtttaacctctcgcctgatctgtccgaaatgcgggcgtatctacaatatgatttcactgccaccaaaagaagacgagctgtgtgacgattgcaaagtcaaattagtacagcgtgatgatgataaggaagaaacggttcgtcaccgcctgaaagtctaccttgagaagacccagccggtcattgactattatggcaagaaaggtattctcaaacgcgtagatgggtcgcaaggaatcgacaacgttgttgcagaagtcctgaagattattggttggagcgataag

SEQ ID NO: 98 - protein, 231 aa, synthetic construct
  REGION 1..231: note = Variant of adenylate kinase
MHHHHHHGGSGMMAYLVFLGPPGAGKGTQSKRIQEKTGIPHISTGDIFRDIVKKENDELGKKIKEIMRKGELVPDELVNEVVKRRLSEKDCEKGFILDGYPRTVAQAEFLDSFLESQNKQLTAAVLFKVPEDVVVQRLTSRLICPKCGRIYNMISLPPKEDELCDDCKVKLVQRDDDKEETVRHRLKVYLEKTQPVIDYYGKKGILKRVDGSQGIDNVVAEVLKIIGWSDK

SEQ ID NO: 99 - DNA, 693 bp, synthetic construct
  misc_feature 1..693: note = Variant of adenylate kinase
  source 1..693: mol_type = other DNA
atgcaccatcatcaccatcacgggggctccggcatgatggcatatctggtgttcttaggtccgccgggcgcgggaaaaggtacccaatcgaaacgcattcaggaaaagactggcatcccacatattagcacgggcgatatcttccgtgacatcgtcaagaaagagaacgatgaactgggcaagaagattaaagaaatcatggagaaaggtgaactcgttccagatgaactggtgaatgaggtagtaaaacgccgcctgtcggagaaagactgcgaagtgggctttattttggatggttatccgcgtaccgttgctcaagcggaattcctggacagttttcttgaatcccagaacaaacagttgacagccgccgtgctgttcaaagtccccgaagatgttgttgtgcaacgtttaacctctcgcctgatctgtccgaaatgcgggcgtatctacaatatgatttcactgccaccaaaagaagacgagctgtgtgacgattgcaaagtcaaattagtacagcgtgatgatgataaggaagaaacggttcgtcaccgcctgaaagtctaccttgagaagacccagccggtcattgactattatggcaagaaaggtattctcaaacgcgtagatgggtcgcaaggaatcgacaacgttgttgcagaagtcctgaagattattggttggagcgataag

SEQ ID NO: 100 - protein, 231 aa, synthetic construct
  REGION 1..231: note = Variant of adenylate kinase
MHHHHHHGGSGMMAYLVFLGPPGAGKGTQSKRIQEKTGIPHISTGDIFRDIVKKENDELGKKIKEIMEKGELVPDELVNEVVKRRLSEKDCEVGFILDGYPRTVAQAEFLDSFLESQNKQLTAAVLFKVPEDVVVQRLTSRLICPKCGRIYNMISLPPKEDELCDDCKVKLVQRDDDKEETVRHRLKVYLEKTQPVIDYYGKKGILKRVDGSQGIDNVVAEVLKIIGWSDK

SEQ ID NO: 101 - DNA, 693 bp, synthetic construct
  misc_feature 1..693: note = Variant of adenylate kinase
  source 1..693: mol_type = other DNA
atgcaccatcatcaccatcacgggggctccggcatgatggcatatctggtgttcttaggtccgccgggcgcgggaaaaggtacccaatcgaaacgcattcaggaaaagactggcatcccacatattagcacgggcgatatcttccgtgacatcgtcaagaaagagaacgatgaactgggcaagaagattaaagaaatcatggagaaaggtgaactcgttccagatgaatcggtgaatgaggtagtaaaacgccgcctgtcggagaaagactgcgaaaaaggctttattttggatggttatccgcgtaccgttgctcaagcggaattcctggacagttttcttgaatcccagaacaaacagttgacagccgccgtgctgttcaaagtccccgaagatgttgttgtgcaacgtttaacctctcgcctgatctgtccgaaatgcgggcgtatctacaatatgatttcactgccaccaaaagaagacgagctgtgtgacgattgcaaagtcaaattagtacagcgtgatgatgataaggaagaaacggttcgtcaccgcctgaaagtctaccttgagaagacccagccggtcattgactattatggcaagaaaggtattctcaaacgcgtagatgggtcgcaaggaatcgacaacgttgttgcagaagtcctgaagattattggttggagcgataag

SEQ ID NO: 102 - protein, 231 aa, synthetic construct
  REGION 1..231: note = Variant of adenylate kinase
MHHHHHHGGSGMMAYLVFLGPPGAGKGTQSKRIQEKTGIPHISTGDIFRDIVKKENDELGKKIKEIMEKGELVPDESVNEVVKRRLSEKDCEKGFILDGYPRTVAQAEFLDSFLESQNKQLTAAVLFKVPEDVVVQRLTSRLICPKCGRIYNMISLPPKEDELCDDCKVKLVQRDDDKEETVRHRLKVYLEKTQPVIDYYGKKGILKRVDGSQGIDNVVAEVLKIIGWSDK

SEQ ID NO: 103 - DNA, 693 bp, synthetic construct
  misc_feature 1..693: note = Variant of adenylate kinase
  source 1..693: mol_type = other DNA
atgcaccatcatcaccatcacgggggctccggcatgatggcatatctggtgttcttaggtccgccgggcgcgggaaaaggtacccaatcgaaacgcattcaggaaaagactggcatcccacatattagcacgggcgatatcttccgtgacatcgtcaagaaagagaacgatgaactgggcaagctgattaaagaaatcatggagaaaggtgaactcgttccagatgaactggtgaatgaggtagtaaaacgccgcctgtcggagaaagactgcgaaaaaggctttattttggatggttatccgcgtaccgttgctcaagcggaattcctggacagttttcttgaatcccagaacaaacagttgacagccgccgtgctgttcaaagtccccgaagatgttgttgtgcaacgtttaacctctcgcctgatctgtccgaaatgcgggcgtatctacaatatgatttcactgccaccaaaagaagacgagctgtgtgacgattgcaaagtcaaattagtacagcgtgatgatgataaggaagaaacggttcgtcaccgcctgaaagtctaccttgagaagacccagccggtcattgactattatggcaagaaaggtattctcaaacgcgtagatgggtcgcaaggaatcgacaacgttgttgcagaagtcctgaagattattggttggagcgataag

SEQ ID NO: 104 - protein, 231 aa, synthetic construct
  REGION 1..231: note = Variant of adenylate kinase
MHHHHHHGGSGMMAYLVFLGPPGAGKGTQSKRIQEKTGIPHISTGDIFRDIVKKENDELGKLIKEIMEKGELVPDELVNEVVKRRLSEKDCEKGFILDGYPRTVAQAEFLDSFLESQNKQLTAAVLFKVPEDVVVQRLTSRLICPKCGRIYNMISLPPKEDELCDDCKVKLVQRDDDKEETVRHRLKVYLEKTQPVIDYYGKKGILKRVDGSQGIDNVVAEVLKIIGWSDK

SEQ ID NO: 105 - DNA, 693 bp, synthetic construct
  misc_feature 1..693: note = Variant of adenylate kinase
  source 1..693: mol_type = other DNA
atgcaccatcatcaccatcacgggggctccggcatgatgtgttatctggtgttcttaggtccgccgggcgcgggaaaaggtacccaatcgaaacgcattcaggaaaagactggcatcccacatattagcacgggcgatatcttccgtgacatcgtcaagaaagagaacgatgaactgggcaagaagattaaagaaatcatggagaaaggtgaactcgttccagatgaactggtgaatgaggtagtaaaacgccgcctgtcggagaaagactgcgaaaaaggctttattttggatggttatccgcgtaccgttgctcaagcggaattcctggacagttttcttgaatcccagaacaaacagttgacagccgccgtgctgttcaaagtccccgaagatgttgttgtgcaacgtttaacctctcgcctgatctgtccgaaatgcgggcgtatctacaatatgatttcactgccaccaaaagaagacgagctgtgtgacgattgcaaagtcaaattagtacagcgtgatgatgataaggaagaaacggttcgtcaccgcctgaaagtctaccttgagaagacccagccggtcattgactattatggcaagaaaggtattctcaaacgcgtagatgggtcgcaaggaatcgacaacgttgttgcagaagtcctgaagattattggttggagcgataag

SEQ ID NO: 106 - protein, 231 aa, synthetic construct
  REGION 1..231: note = Variant of adenylate kinase
MHHHHHHGGSGMMCYLVFLGPPGAGKGTQSKRIQEKTGIPHISTGDIFRDIVKKENDELGKKIKEIMEKGELVPDELVNEVVKRRLSEKDCEKGFILDGYPRTVAQAEFLDSFLESQNKQLTAAVLFKVPEDVVVQRLTSRLICPKCGRIYNMISLPPKEDELCDDCKVKLVQRDDDKEETVRHRLKVYLEKTQPVIDYYGKKGILKRVDGSQGIDNVVAEVLKIIGWSDK

SEQ ID NO: 107 - DNA, 693 bp, synthetic construct
  misc_feature 1..693: note = Variant of adenylate kinase
  source 1..693: mol_type = other DNA
atgcaccatcatcaccatcacgggggctccggcatgatggcatatctggtgttcttaggtcctccgggcgcgggaaaaggtacccaatcgaaacgcattcaggaaaagactggcatcccacatattagcacgggcgatatcttccgtgaccgtgtcaagaaagagaacgatgaactgggcaagaagattaaagaaatcatggagaaaggtgaactcgttccagatgaactggtgaatgaggtagtaaaacgccgcctgtcggagaaagactgcgaaaaaggctttattttggatggttatccgcgtaccgttgctcaagcggaattcctggacagttttcttgaatcccagaacaaacagttgacagccgccgtgctgttcaaagtccccgaagatgttgttgtgcaacgtttaacctctcgcctgatctgtccgaaatgcgggcgtatctacaatatgatttcactgccaccaaaagaagacgagctgtgtgacgattgcaaagtcaaattagtacagcgtgatgatgataaggaagaaacggttcgtcaccgcctgaaagtctaccttgagaagacccagccggtcattgactattatggcaagaaaggtattctcaaacgcgtagatgggtcgcaaggaatcgacaacgttgttgcagaagtcctgaagattattggttggagcgataag

SEQ ID NO: 108 - protein, 231 aa, synthetic construct
  REGION 1..231: note = Variant of adenylate kinase
MHHHHHHGGSGMMAYLVFLGPPGAGKGTQSKRIQEKTGIPHISTGDIFRDRVKKENDELGKKIKEIMEKGELVPDELVNEVVKRRLSEKDCEKGFILDGYPRTVAQAEFLDSFLESQNKQLTAAVLFKVPEDVVVQRLTSRLICPKCGRIYNMISLPPKEDELCDDCKVKLVQRDDDKEETVRHRLKVYLEKTQPVIDYYGKKGILKRVDGSQGIDNVVAEVLKIIGWSDK

SEQ ID NO: 109 - DNA, 693 bp, synthetic construct
  misc_feature 1..693: note = Variant of adenylate kinase
  source 1..693: mol_type = other DNA
atgcaccatcatcaccatcacgggggctccggcatgatggcatatctggtgttcttaggtccgccgggcgcgggaaaaggtacccaatcgaaacgcattcaggaaaagactggcatcccacatattagcacgggcgatatcttccgtgacatcgtcaagaaagagaacgatgaactgggcaagaagattaaagaaatcatggagaaaggtgaactcgttccagatgaactggtgaatgaggtagtaaaacgccgcctgtcggagaaagactgcgaaaaaggctttattttggatggttatccgcgtaccgttgctcaagcggaattcctggacagttttcttgaatcccagcgtaaacagttgacagccgccgtgctgttcaaagtccccgaagatgttgttgtgcaacgtttaacctctcgcctgatctgtccgaaatgcgggcgtatctacaatatgatttcactgccaccaaaagaagacgagctgtgtgacgattgcaaagtcaaattagtacagcgtgatgatgataaggaagaaacggttcgtcaccgcctgaaagtctaccttgagaagacccagccggtcattgactattatggcaagaaaggtattctcaaacgcgtagatgggtcgcaaggaatcgacaacgttgttgcagaagtcctgaagattattggttggagcgataag

SEQ ID NO: 110 - protein, 231 aa, synthetic construct
  REGION 1..231: note = Variant of adenylate kinase
MHHHHHHGGSGMMAYLVFLGPPGAGKGTQSKRIQEKTGIPHISTGDIFRDIVKKENDELGKKIKEIMEKGELVPDELVNEVVKRRLSEKDCEKGFILDGYPRTVAQAEFLDSFLESQRKQLTAAVLFKVPEDVVVQRLTSRLICPKCGRIYNMISLPPKEDELCDDCKVKLVQRDDDKEETVRHRLKVYLEKTQPVIDYYGKKGILKRVDGSQGIDNVVAEVLKIIGWSDK

SEQ ID NO: 111 - DNA, 693 bp, synthetic construct
  misc_feature 1..693: note = Variant of adenylate kinase
  source 1..693: mol_type = other DNA
atgcaccatcatcaccatcacgggggctccggcatgatggcatatctggtgttcttaggtccgccgggcgcgggaaaaggtacccaatcgaaacgcattcaggaaaagactggcatcccacatattagcacgggcgatatcttccgtgacatcgtcaagaaagagaacgatgaactgggcaagaagattaaagaaatcatggagaaaggtgaactcgttccagatgaactggtgaatgaggtagtaaaacgccgcctgtcggagaaagactttgaaaaaggctttattttggatggttatccgcgtaccgttgctcaagcggaattcctggacagttttcttgaatcccagaacaaacagttgacagccgccgtgctgttcaaagtccccgaagatgttgttgtgcaacgtttaacctctcgcctgatctgtccgaaatgcgggcgtatctacaatatgatttcactgccaccaaaagaagacgagctgtgtgacgattgcaaagtcaaattagtacagcgtgatgatgataaggaagaaacggttcgtcaccgcctgaaagtctaccttgagaagacccagccggtcattgactattatggcaagaaaggtattctcaaacgcgtagatgggtcgcaaggaatcgacaacgttgttgcagaagtcctgaagattattggttggagcgataag

SEQ ID NO: 112 - protein, 231 aa, synthetic construct
  REGION 1..231: note = Variant of adenylate kinase
MHHHHHHGGSGMMAYLVFLGPPGAGKGTQSKRIQEKTGIPHISTGDIFRDIVKKENDELGKKIKEIMEKGELVPDELVNEVVKRRLSEKDFEKGFILDGYPRTVAQAEFLDSFLESQNKQLTAAVLFKVPEDVVVQRLTSRLICPKCGRIYNMISLPPKEDELCDDCKVKLVQRDDDKEETVRHRLKVYLEKTQPVIDYYGKKGILKRVDGSQGIDNVVAEVLKIIGWSDK

SEQ ID NO: 113 - DNA, 693 bp, synthetic construct
  misc_feature 1..693: note = Variant of adenylate kinase
  source 1..693: mol_type = other DNA
atgcaccatcatcaccatcacgggggctccggcatgatggcatatctggtgttcttaggtccgccgggcgcgggaaaaggtacccaatcgaaacgcattcaggaaaagactggcatcccacatattagcacgggcgatatcttccgtgacatcgtcaagaaagagaacgatgaactgggcaagaagattaaagaaatcatggagaaaggtgaactcgttccagatgaactggtgaatgaggtagtaaaacgccgcctgtcggagaaagactgcgaaaaaggctttattttggatggttatccgcgtaccgttgctcaagcggaattcctggacagttttcttgaatcccagaacaaacagttgacagccgccgtgctgttcaaagtccccgaagatgttgttgtgcaacgtttaacctctcgcctgatctgtccgaaatgcgggcgtatctacaatatgatttcactgccaccaaaagaagacgaggggtgtgacgattgcaaagtcaaattagtacagcgtgatgatgataaggaagaaacggttcgtcaccgcctgaaagtctaccttgagaagacccagccggtcattgactattatggcaagaaaggtattctcaaacgcgtagatgggtcgcaaggaatcgacaacgttgttgcagaagtcctgaagattattggttggagcgataag

SEQ ID NO: 114 - protein, 231 aa, synthetic construct
  REGION 1..231: note = Variant of adenylate kinase
MHHHHHHGGSGMMAYLVFLGPPGAGKGTQSKRIQEKTGIPHISTGDIFRDIVKKENDELGKKIKEIMEKGELVPDELVNEVVKRRLSEKDCEKGFILDGYPRTVAQAEFLDSFLESQNKQLTAAVLFKVPEDVVVQRLTSRLICPKCGRIYNMISLPPKEDEGCDDCKVKLVQRDDDKEETVRHRLKVYLEKTQPVIDYYGKKGILKRVDGSQGIDNVVAEVLKIIGWSDK

SEQ ID NO: 115 - DNA, 693 bp, synthetic construct
  misc_feature 1..693: note = Variant of adenylate kinase
  source 1..693: mol_type = other DNA
atgcaccatcatcaccatcacgggggctccggcatgatggcatatctggtgttcttaggtccgccgggcgcgggaaaaggtacccaatcgaaacgcattcaggaaaagactggcatcccacatattagcacgggcgatatcttccgtgacatcgtcaagaaagagaacgatgaactgggcaagaagattaaaccgatcatggagaaaggtgaactcgttccagatgaactggtgaatgaggtagtaaaacgccgcctgtcggagaaagactgcgaaaaaggctttattttggatggttatccgcgtaccgttgctcaagcggaattcctggacagttttcttgaatcccagaacaaacagttgacagccgccgtgctgttcaaagtccccgaagatgttgttgtgcaacgtttaacctctcgcctgatctgtccgaaatgcgggcgtatctacaatatgatttcactgccaccaaaagaagacgagctgtgtgacgattgcaaagtcaaattagtacagcgtgatgatgataaggaagaaacggttcgtcaccgcctgaaagtctaccttgagaagacccagccggtcattgactattatggcaagaaaggtattctcaaacgcgtagatgggtcgcaaggaatcgacaacgttgttgcagaagtcctgaagattattggttggagcgataag

SEQ ID NO: 116 - protein, 231 aa, synthetic construct
  REGION 1..231: note = Variant of adenylate kinase
MHHHHHHGGSGMMAYLVFLGPPGAGKGTQSKRIQEKTGIPHISTGDIFRDIVKKENDELGKKIKPIMEKGELVPDELVNEVVKRRLSEKDCEKGFILDGYPRTVAQAEFLDSFLESQNKQLTAAVLFKVPEDVVVQRLTSRLICPKCGRIYNMISLPPKEDELCDDCKVKLVQRDDDKEETVRHRLKVYLEKTQPVIDYYGKKGILKRVDGSQGIDNVVAEVLKIIGWSDK

SEQ ID NO: 117 - DNA, 693 bp, synthetic construct
  misc_feature 1..693: note = Variant of adenylate kinase
  source 1..693: mol_type = other DNA
atgcaccatcatcaccatcacgggggctccggcatgatggcatatctggtgttcttaggtccgccgggcgcgggaaaaggtacccaatcgaaacgcattcaggaaaagactggcatcccacatattagcacgggcgatatcttccgtgacatcgtcaagaaagagaacgatgaactgggcaagaagattaaagaaatcatggagaaaggtgaactcgttccagatgaactggtgaatgaggtagtaaaacgccgcctgtcggagaaagactgcgaaaaaggctttattttggatggttatccgcgtaccgttgctcaagcggaattcctggacagttttcttgaatcccagaacaaacagttgacagccgccgtgctgttcaaagtccccgaagatgttgttgtgcaacgtttaacctctcgcctgatctgtccgaaatgcgggcgtatctacaatatgatttcactgccaccaaaagaagacgagctgtgtgacgattgcaaagtcaaattagtacgtcgtgatgatgataaggaagaaacggttcgtcaccgcctgaaagtctaccttgagaagacccagccggtcattgactattatggcaagaaaggtattctcaaacgcgtagatgggtcgcaaggaatcgacaacgttgttgcagaagtcctgaagattattggttggagcgataag

SEQ ID NO: 118 - protein, 231 aa, synthetic construct
  REGION 1..231: note = Variant of adenylate kinase
MHHHHHHGGSGMMAYLVFLGPPGAGKGTQSKRIQEKTGIPHISTGDIFRDIVKKENDELGKKIKEIMEKGELVPDELVNEVVKRRLSEKDCEKGFILDGYPRTVAQAEFLDSFLESQNKQLTAAVLFKVPEDVVVQRLTSRLICPKCGRIYNMISLPPKEDELCDDCKVKLVRRDDDKEETVRHRLKVYLEKTQPVIDYYGKKGILKRVDGSQGIDNVVAEVLKIIGWSDK

SEQ ID NO: 119 - DNA, 693 bp, synthetic construct
  misc_feature 1..693: note = Variant of adenylate kinase
  source 1..693: mol_type = other DNA
atgcaccatcatcaccatcacgggggctccggcatgatggcatatctggtgttcttaggtccgccgggcgcgggaaaaggtacccaatcgaaacgcattcaggaaaagactggcatcccacatattagcacgggcgatatcttccgtgacatcgtcaagaaagagaacgatgaactgggcaagaagattaaagaaatcatggagaaaggtgaactcgttccagatgaactggtgaatgaggtagtaaaacgccgcctgtcggagaaagactgcgaaaaaggctttattttggatggttatccgcgtaccgttgctcaagcggaattcctggacagttttcttgaatcccagaacaaacagttgacagccgccgtgctgttcaaagtccccgaagatgttgttgtgcaacgtttaacctctcgcctgatctgtccgaaatgcgggcgtatctacaatatgatttcactgccaccaaaagaagacgagctgtgtgacgattgcaaagtcaaattagtacagcgtgatgatgataaggaagaaacggttcgtcaccgcctgaaagtctaccttgagaagacccagccggtcattgactattatggcaagaaaggtattctcaaacgcgtagatgggtcgcaaggaatcgacaacgttgttgcagaagtcctgggtattattggttggagcgataag

SEQ ID NO: 120 - protein, 231 aa, synthetic construct
  REGION 1..231: note = Variant of adenylate kinase
MHHHHHHGGSGMMAYLVFLGPPGAGKGTQSKRIQEKTGIPHISTGDIFRDIVKKENDELGKKIKEIMEKGELVPDELVNEVVKRRLSEKDCEKGFILDGYPRTVAQAEFLDSFLESQNKQLTAAVLFKVPEDVVVQRLTSRLICPKCGRIYNMISLPPKEDELCDDCKVKLVQRDDDKEETVRHRLKVYLEKTQPVIDYYGKKGILKRVDGSQGIDNVVAEVLGIIGWSDK

SEQ ID NO: 121 - DNA, 693 bp, synthetic construct
  misc_feature 1..693: note = Variant of adenylate kinase
  source 1..693: mol_type = other DNA
atgcaccatcatcaccatcacgggggctccggcatgatggcatatctggtgttcttaggtccgccgggcgcgggaaaaggtacccaatcgaaacgcattcaggaaaagactggcatcccacatattagcacgggcgatatcttccgtgacatcgtcaagaaagagaacgatgaactgggcaagaagattaaagaagagatggagaaaggtgaactcgttccagatgaactggtgaatgaggtagtaaaacgccgcctgtcggagaaagactgcgaaaaaggctttattttggatggttatccgcgtaccgttgctcaagcggaattcctggacagttttcttgaatcccagaacaaacagttgacagccgccgtgctgttcaaagtccccgaagatgttgttgtgcaacgtttaacctctcgcctgatctgtccgaaatgcgggcgtatctacaatatgatttcactgccaccaaaagaagacgagctgtgtgacgattgcaaagtcaaattagtacagcgtgatgatgataaggaagaaacggttcgtcaccgcctgaaagtctaccttgagaagacccagccggtcattgactattatggcaagaaaggtattctcaaacgcgtagatgggtcgcaaggaatcgacaacgttgttgcagaagtcctgaagattattggttggagcgataag

SEQ ID NO: 122 - protein, 231 aa, synthetic construct
  REGION 1..231: note = Variant of adenylate kinase
MHHHHHHGGSGMMAYLVFLGPPGAGKGTQSKRIQEKTGIPHISTGDIFRDIVKKENDELGKKIKEEMEKGELVPDELVNEVVKRRLSEKDCEKGFILDGYPRTVAQAEFLDSFLESQNKQLTAAVLFKVPEDVVVQRLTSRLICPKCGRIYNMISLPPKEDELCDDCKVKLVQRDDDKEETVRHRLKVYLEKTQPVIDYYGKKGILKRVDGSQGIDNVVAEVLKIIGWSDK

SEQ ID NO: 123 - DNA, 693 bp, synthetic construct
  misc_feature 1..693: note = Variant of adenylate kinase
  source 1..693: mol_type = other DNA
atgcaccatcatcaccatcacgggggctccggcatgatggcatatctggtgttcttaggtccgccgggcgcgggaaaaggtacccaatcgaaacgcattcaggaaaagactggcatcccacatattagcacgggcgatatcttccgtgacatcgtcaagaaagagaacgatgaactgggcaagaagattaaagaaatcatggagaaaggtgaactcgttccagatgaactggtgaatgaggtagtaaaacgccgcctgtcggagaaagactgcgaaaaaggctttattttggatggttatccgcgtaccgttgctcaagcggaagagctggacagttttcttgaatcccagaacaaacagttgacagccgccgtgctgttcaaagtccccgaagatgttgttgtgcaacgtttaacctctcgcctgatctgtccgaaatgcgggcgtatctacaatatgatttcactgccaccaaaagaagacgagctgtgtgacgattgcaaagtcaaattagtacagcgtgatgatgataaggaagaaacggttcgtcaccgcctgaaagtctaccttgagaagacccagccggtcattgactattatggcaagaaaggtattctcaaacgcgtagatgggtcgcaaggaatcgacaacgttgttgcagaagtcctgaagattattggttggagcgataag

SEQ ID NO: 124 - protein, 231 aa, synthetic construct
  REGION 1..231: note = Variant of adenylate kinase
MHHHHHHGGSGMMAYLVFLGPPGAGKGTQSKRIQEKTGIPHISTGDIFRDIVKKENDELGKKIKEIMEKGELVPDELVNEVVKRRLSEKDCEKGFILDGYPRTVAQAEELDSFLESQNKQLTAAVLFKVPEDVVVQRLTSRLICPKCGRIYNMISLPPKEDELCDDCKVKLVQRDDDKEETVRHRLKVYLEKTQPVIDYYGKKGILKRVDGSQGIDNVVAEVLKIIGWSDK

SEQ ID NO: 125 - DNA, 693 bp, synthetic construct
  misc_feature 1..693: note = Variant of adenylate kinase
  source 1..693: mol_type = other DNA
atgcaccatcatcaccatcacgggggctccggcatgatggcatatctggtgttcttaggtccgccgggcgcgggaaaaggtacccaatcgaaacgcattcaggaaaagactggcatcccacatattagcacgggcgatatcttccgtgacatcgtcaagaaagagaacgatgaactgtctaagaagattaaagaaatcatggagaaaggtgaactcgttccagatgaactggtgaatgaggtagtaaaacgccgcctgtcggagaaagactgcgaaaaaggctttattttggatggttatccgcgtaccgttgctcaagcggaattcctggacagttttcttgaatcccagaacaaacagttgacagccgccgtgctgttcaaagtccccgaagatgttgttgtgcaacgtttaacctctcgcctgatctgtccgaaatgcgggcgtatctacaatatgatttcactgccaccaaaagaagacgagctgtgtgacgattgcaaagtcaaattagtacagcgtgatgatgataaggaagaaacggttcgtcaccgcctgaaagtctaccttgagaagacccagccggtcattgactattatggcaagaaaggtattctcaaacgcgtagatgggtcgcaaggaatcgacaacgttgttgcagaagtcctgaagattattggttggagcgataag

SEQ ID NO: 126 - protein, 231 aa, synthetic construct
  REGION 1..231: note = Variant of adenylate kinase
MHHHHHHGGSGMMAYLVFLGPPGAGKGTQSKRIQEKTGIPHISTGDIFRDIVKKENDELSKKIKEIMEKGELVPDELVNEVVKRRLSEKDCEKGFILDGYPRTVAQAEFLDSFLESQNKQLTAAVLFKVPEDVVVQRLTSRLICPKCGRIYNMISLPPKEDELCDDCKVKLVQRDDDKEETVRHRLKVYLEKTQPVIDYYGKKGILKRVDGSQGIDNVVAEVLKIIGWSDK

SEQ ID NO: 127 - DNA, 693 bp, synthetic construct
  misc_feature 1..693: note = Variant of adenylate kinase
  source 1..693: mol_type = other DNA
atgcaccatcatcaccatcacgggggctccggcatgatggcatatctggtgttcttaggtccgccgggcgcgggaaaaggtacccaatcgaaacgcattcaggaaaagactggcatctgccatattagtacgggcgatatcttccgtgacatcgtcaagaaagagaacgatgaactgggcaagaagattaaagaaatcatggagaaaggtgaactcgttccagatgaactggtgaatgaggtagtaaaacgccgcctgtcgaacaaagactgcgaaaaaggctttattttggatggttatccgcgtaccgttgctcaagcggaattcctggacagttttcttgaatcccagaacaaacagttgacagccgccgtgctgttcaaagtccccgaagatgttgttgtgcaacgtttaacctctcgcctgatctgtccgaaatgcgggcgtatctacaatatgatttcactgccaccaaaagaagacgagctgtgtgacgattgcaaagtcaaattagtacagcgtgatgatgataaggaagaaacggttcgtcaccgcctgaaagtctaccttgagaagacccagccggtcattgactattatggcaagaaaggtattctcaaacgcgtagatgggtcgcaaggaatcgacaacgttgttgcagaagtcctgaagattattggttggagcgataag

SEQ ID NO: 128 - protein, 231 aa, synthetic construct
  REGION 1..231: note = Variant of adenylate kinase
MHHHHHHGGSGMMAYLVFLGPPGAGKGTQSKRIQEKTGICHISTGDIFRDIVKKENDELGKKIKEIMEKGELVPDELVNEVVKRRLSNKDCEKGFILDGYPRTVAQAEFLDSFLESQNKQLTAAVLFKVPEDVVVQRLTSRLICPKCGRIYNMISLPPKEDELCDDCKVKLVQRDDDKEETVRHRLKVYLEKTQPVIDYYGKKGILKRVDGSQGIDNVVAEVLKIIGWSDK

SEQ ID NO: 129 - DNA, 693 bp, synthetic construct
  misc_feature 1..693: note = Variant of adenylate kinase
  source 1..693: mol_type = other DNA
atgcaccatcatcaccatcacgggggctccggcatgatggcatatctggtgttcttaggtccgccgggcgcgggaaaaggtacccaatcgaaacgcattcaggaaaagactggcatcccacatattagcacgggcgatatcttccgtgacatcgtcaagaaagagaacgatgaactgggcaagaagattaaagaaatcatggagaaaggtgaactcgttccagatgaactggtgaatgaggtagtaaaacgccgcctgtcggagaaagactgcgaaaaaggctttattttggatggttatccgcgtaccgttgctcaagcggaattcctggacagttttcttgaatcccagaacaaacagttgacagccgccgtgctgttcaaagtccccgaagatgttgttgtgcaacgtttaacctctcgcctgatctgtccgaaatgcgggcgtatctacaatatgatttcactgccaccaaaagaagacgagctgtgtgacgattgcaaagtcaaattagtacagcgtgatgatgataaggaagaaacggttcgtcaccgcctgaaagtctaccttgataagacccagccggtcattgactattatggcaagaaaggtattctcaaacgcgtagatgggtcgcaaggaatcgacaacgttgttgcagaagtcctgaagattattggttggagcgataag

SEQ ID NO: 130 - protein, 231 aa, synthetic construct
  REGION 1..231: note = Variant of adenylate kinase
MHHHHHHGGSGMMAYLVFLGPPGAGKGTQSKRIQEKTGIPHISTGDIFRDIVKKENDELGKKIKEIMEKGELVPDELVNEVVKRRLSEKDCEKGFILDGYPRTVAQAEFLDSFLESQNKQLTAAVLFKVPEDVVVQRLTSRLICPKCGRIYNMISLPPKEDELCDDCKVKLVQRDDDKEETVRHRLKVYLDKTQPVIDYYGKKGILKRVDGSQGIDNVVAEVLKIIGWSDK

SEQ ID NO: 131 - DNA, 693 bp, synthetic construct
  misc_feature 1..693: note = Variant of adenylate kinase
  source 1..693: mol_type = other DNA
atgcaccatcatcaccatcacgggggctccggcatgatggcatatctggtgttcttaggtccgccgggcgcgggaaaaggtacccaatcgaaacgcattcaggaaaagactggcatcccacatattagcacgggcgatatcttccgtgacatcgtcaagaaagagaacgatgaactgggcaagaagtcgaaagaaatcatggagaaaggtgaactcgttccagatgaactggtgaatgaggtagtaaaacgccgcctgtcggagaaagactgcgaaaaaggctttattttggatggttatccgcgtaccgttgctcaagcggaattcctggacagttttcttgaatcccagaacaaacagttgacagccgccgtgctgttcaaagtccccgaagatgttgttgtgcaacgtttaacctctcgcctgatctgtccgaaatgcgggcgtatctacaatatgatttcactgccaccaaaagaagacgagctgtgtgacgattgcaaagtcaaattagtacagcgtgatgatgataaggaagaaacggttcgtcaccgcctgaaagtctaccttgagaagacccagccggtcattgactattatggcaagaaaggtattctcaaacgcgtagatgggtcgcaaggaatcgacaacgttgttgcagaagtcctgaagattattggttggagcgataag

SEQ ID NO: 132 - protein, 231 aa, synthetic construct
  REGION 1..231: note = Variant of adenylate kinase
MHHHHHHGGSGMMAYLVFLGPPGAGKGTQSKRIQEKTGIPHISTGDIFRDIVKKENDELGKKSKEIMEKGELVPDELVNEVVKRRLSEKDCEKGFILDGYPRTVAQAEFLDSFLESQNKQLTAAVLFKVPEDVVVQRLTSRLICPKCGRIYNMISLPPKEDELCDDCKVKLVQRDDDKEETVRHRLKVYLEKTQPVIDYYGKKGILKRVDGSQGIDNVVAEVLKIIGWSDK

SEQ ID NO: 133 - DNA, 693 bp, synthetic construct
  misc_feature 1..693: note = Variant of adenylate kinase
  source 1..693: mol_type = other DNA
atgcaccatcatcaccatcacgggggctccggcatgatggcatatctggtgttcttaggtccgccgggcgcgggaaaaggtacccaatcgaaacgcattcaggaaaagactggcatcccacatattagcacgggcgatatcttccgtgacatcgtcaagaaagagaacgatgaactgggcaagaagattaaagaaatcatggataaaggtgaactcgttccagatgaactggtgaatgaggtagtaaaacgccgcctgtcggagaaagactgcgaaaaaggctttattttggatggttatccgcgtaccgttgctcaagcggaattcctggacagttttcttgaatcccagaacaaacagttgacagccgccgtgctgttcaaagtccccgaagatgttgttgtgcaacgtttaacctctcgcctgatctgtccgaaatgcgggcgtatctacaatatgatttcactgccaccaaaagaagacgagctgtgtgacgattgcaaagtccctttagtacagcgtgatgatgataaggaagaaacggttcgtcaccgcctgaaagtctaccttgagaagacccagccggtcattgactattatggcaagaaaggtattctcaaacgcgtagatgggtcgcaaggaatcgacaacgttgttgcagaagtcctgaagattattggttggagcgataag

SEQ ID NO: 134 - protein, 231 aa, synthetic construct
  REGION 1..231: note = Variant of adenylate kinase
MHHHHHHGGSGMMAYLVFLGPPGAGKGTQSKRIQEKTGIPHISTGDIFRDIVKKENDELGKKIKEIMDKGELVPDELVNEVVKRRLSEKDCEKGFILDGYPRTVAQAEFLDSFLESQNKQLTAAVLFKVPEDVVVQRLTSRLICPKCGRIYNMISLPPKEDELCDDCKVPLVQRDDDKEETVRHRLKVYLEKTQPVIDYYGKKGILKRVDGSQGIDNVVAEVLKIIGWSDK

SEQ ID NO: 135 - DNA, 693 bp, synthetic construct
  misc_feature 1..693: note = Variant of adenylate kinase
  source 1..693: mol_type = other DNA
atgcaccatcatcaccatcacgggggctccggcatgatggcatatctggtgttcttaggtccgccgggcgcgggaaaaggtacccaatcgaaacgcattcaggaaaagactggcatcccacatattagcacgggcgatatcttccgtgacatcgtcaagaaagagaacgatgaactgggcaagaagattaaagaaatcatggagaaaggtgaactcgttccagatgaactggtgaatgaggtagtaaaacgccgcctgtcggagaaagactgcgaaaaaggctttattttggatggttctccgcgtaccgttgctcaagcggaattcctggacagttttcttgaatcccagaacaaacagttgacagccgccgtgctgttcaaagtccccgaagatgttgttgtgcaacgtttaacctctcgcctgatctgtccgaaatgcgggcgtatctacaatatgatttcactgccaccaaaagaagacgagctgtgtgacgattgcaaagtcaaattagtacagcgtgatgatgataaggaagaaacggttcgtcaccgcctgaaagtctaccttgagaagacccagccggtcattgactattatggcaagaaaggtattctcaaacgcgtagatgggtcgcaaggaatcgacaacgttgttgcagaagtcctgaagattattggttggagcgataag

SEQ ID NO: 136 - protein, 231 aa, synthetic construct
  REGION 1..231: note = Variant of adenylate kinase
MHHHHHHGGSGMMAYLVFLGPPGAGKGTQSKRIQEKTGIPHISTGDIFRDIVKKENDELGKKIKEIMEKGELVPDELVNEVVKRRLSEKDCEKGFILDGSPRTVAQAEFLDSFLESQNKQLTAAVLFKVPEDVVVQRLTSRLICPKCGRIYNMISLPPKEDELCDDCKVKLVQRDDDKEETVRHRLKVYLEKTQPVIDYYGKKGILKRVDGSQGIDNVVAEVLKIIGWSDK

SEQ ID NO: 137 - DNA, 693 bp, synthetic construct
  misc_feature 1..693: note = Variant of adenylate kinase
  source 1..693: mol_type = other DNA
atgcaccatcatcaccatcacgggggctccggcatgatggcatatctggtgttcttaggtccgccgggcgcgggaaaaggtacccaatcgaaacgcattcaggaaaagactggcatcccacatattagcacgggcgatatcttccgtgacatggtcaagaaagagaacgatgaactgggcaagaagattaaagaaatcatggagaaaggtgaactcgttccagatgaactggtgaatgaggtagtaaaacgccgcctgtcggagaaagactgcgaaaaaggctttattttggatggttatccgcgtaccgttgctcaagcggaattcctggacagttttcttgaatcccagaacaaacagttgacagccgccgtgctgttcaaagtccccgaagatgttgttgtgcaacgtttaacctctcgcctgatctgtccgaaatgcgggcgtatctacaatatgatttcactgccaccaaaagaagacgagctgtgtgacgattgcaaagtcaaattagtacagcgtgatgatgataaggaagaaacggttcgtcaccgcctgaaagtctaccttgagaagacccagccggtcattgactattatggcaagaaaggtattctcaaacgcgtagatgggtcgcaaggaatcgacaacgttgttgcagaagtcctgaagattattggttggagcgataag

SEQ ID NO: 138 - protein, 231 aa, synthetic construct
  REGION 1..231: note = Variant of adenylate kinase
MHHHHHHGGSGMMAYLVFLGPPGAGKGTQSKRIQEKTGIPHISTGDIFRDMVKKENDELGKKIKEIMEKGELVPDELVNEVVKRRLSEKDCEKGFILDGYPRTVAQAEFLDSFLESQNKQLTAAVLFKVPEDVVVQRLTSRLICPKCGRIYNMISLPPKEDELCDDCKVKLVQRDDDKEETVRHRLKVYLEKTQPVIDYYGKKGILKRVDGSQGIDNVVAEVLKIIGWSDK

SEQ ID NO: 139 - DNA, 693 bp, synthetic construct
  misc_feature 1..693: note = Variant of adenylate kinase
  source 1..693: mol_type = other DNA
atgcaccatcatcaccatcacgggggctccggcatgatggcatatctggtgttcttaggtccgccgggcgcgggaaaaggtacccaatcgaaacgcattcaggaaaagactggcatcccacatattagcacgggcgatatcttccgtgacatcgtcaagaaagagaacgatgaactgggcaagaagattaaagaaatcatggagaaaggtgaactcgttccagatgaactggtgaatgaggtagtaaaacgccgcctgtcggagaaagactgcgaaaaaggctttattttggatggttatccgcgtaccgttgctcaagcgagtttcctggacagttttcttgaatcccagaacaaacagttgacagccgccgtgctgttcaaagtccccgaagatgttgttgtgcaacgtttaacctctcgcctgatctgtccgaaatgcgggcgtatctacaatatgatttcactgccaccaaaagaagacgagctgtgtgacgattgcaaagtcaaattagtacagcgtgatgatgataaggaagaaacggttcgtcaccgcctgaaagtctaccttgagaagacccagccggtcattgactattatggcaagaaaggtattctcaaacgcgtagatgggtcgcaaggaatcgacaacgttgttgcagaagtcctgaagattattggttggagcgataag

SEQ ID NO: 140 - protein, 231 aa, synthetic construct
  REGION 1..231: note = Variant of adenylate kinase
MHHHHHHGGSGMMAYLVFLGPPGAGKGTQSKRIQEKTGIPHISTGDIFRDIVKKENDELGKKIKEIMEKGELVPDELVNEVVKRRLSEKDCEKGFILDGYPRTVAQASFLDSFLESQNKQLTAAVLFKVPEDVVVQRLTSRLICPKCGRIYNMISLPPKEDELCDDCKVKLVQRDDDKEETVRHRLKVYLEKTQPVIDYYGKKGILKRVDGSQGIDNVVAEVLKIIGWSDK

SEQ ID NO: 141 - DNA, 693 bp, synthetic construct
  misc_feature 1..693: note = Variant of adenylate kinase
  source 1..693: mol_type = other DNA
atgcaccatcatcaccatcacgggggctccggcatgatggcatatctggtgttcttaggtccgccgggcgcgggaaaaggtacccaatcgaaacgcattcaggaaaagactggcatcccacatattagcacgggcgatatcttccgtgacatcgtcaagaaagagaacgatggtctgggcaagaagattaaagaaatcatggagaaaggtgaactcgttccagatgaactggtgaatgaggtagtaaaacgccgcctgtcggagaaagactgcgaaaaaggctttattttggatggttatccgcgtaccgttgctcaagcggaattcctggacagttttcttgaatcccagaacaaacagttgacagccgccgtgctgttcaaagtccccgaagatgttgttgtgcaacgtttaacctctcgcctgatctgtccgaaatgcgggcgtatctacaatatgatttcactgccaccaaaagaagacgagctgtgtgacgattgcaaagtcaaattagtacagcgtgatgatgataaggaagaaacggttcgtcaccgcctgaaagtctaccttgagaagacccagccggtcattgactattatggcaagaaaggtattctcaaacgcgtagatgggtcgcaaggaatcgacaacgttgttgcagaagtcctgaagattattggttggagcgataag

SEQ ID NO: 142 - protein, 231 aa, synthetic construct
  REGION 1..231: note = Variant of adenylate kinase
MHHHHHHGGSGMMAYLVFLGPPGAGKGTQSKRIQEKTGIPHISTGDIFRDIVKKENDGLGKKIKEIMEKGELVPDELVNEVVKRRLSEKDCEKGFILDGYPRTVAQAEFLDSFLESQNKQLTAAVLFKVPEDVVVQRLTSRLICPKCGRIYNMISLPPKEDELCDDCKVKLVQRDDDKEETVRHRLKVYLEKTQPVIDYYGKKGILKRVDGSQGIDNVVAEVLKIIGWSDK

SEQ ID NO: 143 - DNA, 693 bp, synthetic construct
  misc_feature 1..693: note = Variant of adenylate kinase
  source 1..693: mol_type = other DNA
atgcaccatcatcaccatcacgggggctccggcatgatggcatatctggtgttcttaggtccgccgggcgcgggaaaaggtacccaatcgaaacgcattcaggaaaagactggcatcccacatattagcacgggcgatatcttccgtgacatcgtcaagaaagagaaccatgaactgggcaagaagattaaagaaatcatggagaaaggtgaactcgttccagatgaactggtgaatgaggtagtaaaacgccgcctgtcggagaaagactgcgaaaaaggctttattttggatggttatccgcgtaccgttgctcaagcggaattcctggacagttttcttgaatcccagaacaaacagttgacagccgccgtgctgttcaaagtccccgaagatgttgttgtgcaacgtttaacctctcgcctgatctgtccgaaatgcgggcgtatctacaatatgatttcactgccaccaaaagaagacgagctgtgtgacgattgcaaagtcaaattagtacagcgtgatgatgataaggaagaaacggttcgtcaccgcctgaaagtctaccttgagaagacccagccggtcattgactattatggcaagaaaggtattctcaaacgcgtagatgggtcgcaaggaatcgacaacgttgttgcagaagtcctgaagattattggttggagcgataag

SEQ ID NO: 144 - protein, 231 aa, synthetic construct
  REGION 1..231: note = Variant of adenylate kinase
MHHHHHHGGSGMMAYLVFLGPPGAGKGTQSKRIQEKTGIPHISTGDIFRDIVKKENHELGKKIKEIMEKGELVPDELVNEVVKRRLSEKDCEKGFILDGYPRTVAQAEFLDSFLESQNKQLTAAVLFKVPEDVVVQRLTSRLICPKCGRIYNMISLPPKEDELCDDCKVKLVQRDDDKEETVRHRLKVYLEKTQPVIDYYGKKGILKRVDGSQGIDNVVAEVLKIIGWSDK

SEQ ID NO: 145 - DNA, 693 bp, synthetic construct
  misc_feature 1..693: note = Variant of adenylate kinase
  source 1..693: mol_type = other DNA
atgcaccatcatcaccatcacgggggctccggcatgatggcatatctggtgttcttaggtccgccgggcgcgggaaaaggtacccaatcgaaacgcattcaggaaaagactggcatcccacatattagcacgggcgatatcttccgtgacatcgtcaagaaagagaacgatgaactgggcaagaagattaaagaaatcatggagaaaggtgaactcgttccagatgaactggtgaatgaggtagtaaaacgccgcctgtcggagaaagactgcgaaaaaggctttattttggatggttatccgcgtaccgttgctcaagcggaattcctggacagttttcttgaatcccagaacaaacagttgacagccgccgtgctgttcaaagtccccgaagatgttgttgtgcaacgtttaacctctcgcctgatctgtccgaaatgcgggcgtatctacaatatgatttcactgccaccaaaagaagacgagctgtgtgacgattgcaaagtcaaattagtacagcgtgatgatgataaggaaggtacggttcgtcaccgcctgaaagtctaccttgagaagacccagccggtcattgactattatggcaagaaaggtattctcaaacgcgtagatgggtcgcaaggaatcgacaacgttgttgcagaagtcctgaagattattggttggagcgataag

SEQ ID NO: 146 - protein, 231 aa, synthetic construct
  REGION 1..231: note = Variant of adenylate kinase
MHHHHHHGGSGMMAYLVFLGPPGAGKGTQSKRIQEKTGIPHISTGDIFRDIVKKENDELGKKIKEIMEKGELVPDELVNEVVKRRLSEKDCEKGFILDGYPRTVAQAEFLDSFLESQNKQLTAAVLFKVPEDVVVQRLTSRLICPKCGRIYNMISLPPKEDELCDDCKVKLVQRDDDKEGTVRHRLKVYLEKTQPVIDYYGKKGILKRVDGSQGIDNVVAEVLKIIGWSDK

SEQ ID NO: 147 - DNA, 693 bp, synthetic construct
  misc_feature 1..693: note = Variant of adenylate kinase
  source 1..693: mol_type = other DNA
atgcaccatcatcaccatcacgggggctccggcatgatggcatatctggtgttcttaggtccgccgggcgcgggaaaaggtacccaatcgaaacgcattcaggaaaagactggcatcccacatattagcacgggcgatatcttccgtgacatcgtcaagaaagagaacgatgaactgggcaagaagattaaagaaatcatggagaaaggtgaactcgttccagatgaactggtgaatgaggtagtaaaacgccgcctgtcggagaaagactgcgaaaaaggctttattttggatggttatccgcgtaccgttgctcaagcggaattcctggacagttttcttgaatcccagaacaaacagttgacagccgccgtgctgttcaaagtccccgaagatgttgttgtgcaacgtttaacctctcgcctgatctgtccgaaatgcgggcgtatctacaatatgatttcactgccaccaaaagaagacgagctgtgtgacgattgcaaagtcaaattagtacagcgtgatgatgatcgtgaagaaacggttcgtcaccgcctgaaagtctaccttgagaagacccagccggtcattgactattatggcaagaaaggtattctcaaacgcgtagatgggtcgcaaggaatcgacaacgttgttgcagaagtcctgaagattattggttggagcgataag

SEQ ID NO: 148 - protein, 231 aa, synthetic construct
  REGION 1..231: note = Variant of adenylate kinase
MHHHHHHGGSGMMAYLVFLGPPGAGKGTQSKRIQEKTGIPHISTGDIFRDIVKKENDELGKKIKEIMEKGELVPDELVNEVVKRRLSEKDCEKGFILDGYPRTVAQAEFLDSFLESQNKQLTAAVLFKVPEDVVVQRLTSRLICPKCGRIYNMISLPPKEDELCDDCKVKLVQRDDDREETVRHRLKVYLEKTQPVIDYYGKKGILKRVDGSQGIDNVVAEVLKIIGWSDK

SEQ ID NO: 149 - DNA, 693 bp, synthetic construct
  misc_feature 1..693: note = Variant of adenylate kinase
  source 1..693: mol_type = other DNA
atgcaccatcatcaccatcacgggggctccggcatgatggcatatctggtgttcttaggtccgccgggcgcgggaaaaggtacccaatcgaaacgcattcaggaaaagactggcatcccacatattagcacgggcgatatcttccgtgacatcgtcaagaaagagaacgatgaactgggcaagaagattaaagaaatcatggagaaaggtgaactcgttccagatgaactggtgaatgaggtagtaaaacgccgcctgtcggagaaagactgcgaaaaaggctttattttggatggttatccgcgtaccgttgctcaagcggaattcctggacagttttcttgaatcccagaacaaacagttgacagccgccgtgctgttcaaagtccccgaagatgttgttgtgcaacgtttaacctctcgcctgatctgtccgaaatgcgggcgtatctacaatatgatttcactgccaccaaaagaagacgagctgtgtgacgattgcaaagtcaaattagtacagcgtgatgatgataaggaagaaacggttcgtcaccgcctgaaagtctaccttgagaagacccagccggtcattgaccggtatggcaagaaaggtattctcaaacgcgtagatgggtcgcaaggaatcgacaacgttgttgcagaagtcctgaagattattggttggagcgataag

SEQ ID NO: 150 - protein, 231 aa, synthetic construct
  REGION 1..231: note = Variant of adenylate kinase
MHHHHHHGGSGMMAYLVFLGPPGAGKGTQSKRIQEKTGIPHISTGDIFRDIVKKENDELGKKIKEIMEKGELVPDELVNEVVKRRLSEKDCEKGFILDGYPRTVAQAEFLDSFLESQNKQLTAAVLFKVPEDVVVQRLTSRLICPKCGRIYNMISLPPKEDELCDDCKVKLVQRDDDKEETVRHRLKVYLEKTQPVIDRYGKKGILKRVDGSQGIDNVVAEVLKIIGWSDK

SEQ ID NO: 151 - DNA, 693 bp, synthetic construct
  misc_feature 1..693: note = Variant of adenylate kinase
  source 1..693: mol_type = other DNA
atgcaccatcatcaccatcacgggggctccggcatgatggcatatctggtgttcttaggtccgccgggcgcgggaaaaggtacccaatcgaaacgcattcaggaaaagactggcatctgccatattagtacgggcgatatcttccgtgacatcgtcaagaaagagaacgatgaactgggcaagaagattaaagaaatcatggagaaaggtgaactcgttccagatgaactggtgaatgaggtagtaaaacgccgcctgtcggagaaagactgcgaaaaaggctttattttggatggttatccgcgtaccgttgctcaagcggaattcctggacagttttcttgaatcccagaacaaacagttgacagccgccgtgctgttcaaagtccccgaagatgttgttgtgcaacgtttaacctctcgcctgatctgtccgaaatgcgggcgtatctacaatatgatttcactgccaccaaaagaagacgagctgtgtgacgattgcaaagtcaaattagtacagcgtgatgatgataaggaagaaacggttcgtcaccgcctgaaagtctaccttgagaagacccagccggtcattgactattatggcaagaaaggtattctcaaacgcgtagatgggtcgcaaggaatcgacaacgttgttgcagaagtcctgaagattattggttggagcgataag

SEQ ID NO: 152 - protein, 231 aa, synthetic construct
  REGION 1..231: note = Variant of adenylate kinase
MHHHHHHGGSGMMAYLVFLGPPGAGKGTQSKRIQEKTGICHISTGDIFRDIVKKENDELGKKIKEIMEKGELVPDELVNEVVKRRLSEKDCEKGFILDGYPRTVAQAEFLDSFLESQNKQLTAAVLFKVPEDVVVQRLTSRLICPKCGRIYNMISLPPKEDELCDDCKVKLVQRDDDKEETVRHRLKVYLEKTQPVIDYYGKKGILKRVDGSQGIDNVVAEVLKIIGWSDK

SEQ ID NO: 153 - DNA, 693 bp, synthetic construct
  misc_feature 1..693: note = Variant of adenylate kinase
  source 1..693: mol_type = other DNA
atgcaccatcatcaccatcacgggggctccggcatgatggcatatctggtgttcttaggtccgccgggcgcgggaaaaggtacccaatcgaaacgcattcaggaaaagactggcatcccacatattagcacgggcgatatcttccgtgacatcgtcaagaaagagaacgatgaactgggcaagaagattaaagaaatcatggagaaaggtgaactcgttccagatgaactggtgaatgaggtagtaaaacgccgcctgtcggagaaagactgcgaaaaacagtttattttggatggttatccgcgtaccgttgctcaagcggaattcctggacagttttcttgaatcccagaacaaacagttgacagccgccgtgctgttcaaagtccccgaagatgttgttgtgcaacgtttaacctctcgcctgatctgtccgaaatgcgggcgtatctacaatatgatttcactgccaccaaaagaagacgagctgtgtgacgattgcaaagtcaaattagtacagcgtgatgatgataaggaagaaacggttcgtcaccgcctgaaagtctaccttgagaagacccagccggtcattgactattatggcaagaaaggtattctcaaacgcgtagatgggtcgcaaggaatcgacaacgttgttgcagaagtcctgaagattattggttggagcgataag

SEQ ID NO: 154 - protein, 231 aa, synthetic construct
  REGION 1..231: note = Variant of adenylate kinase
MHHHHHHGGSGMMAYLVFLGPPGAGKGTQSKRIQEKTGIPHISTGDIFRDIVKKENDELGKKIKEIMEKGELVPDELVNEVVKRRLSEKDCEKQFILDGYPRTVAQAEFLDSFLESQNKQLTAAVLFKVPEDVVVQRLTSRLICPKCGRIYNMISLPPKEDELCDDCKVKLVQRDDDKEETVRHRLKVYLEKTQPVIDYYGKKGILKRVDGSQGIDNVVAEVLKIIGWSDK

SEQ ID NO: 155 - DNA, 693 bp, synthetic construct
  misc_feature 1..693: note = Variant of adenylate kinase
  source 1..693: mol_type = other DNA
atgcaccatcatcaccatcacgggggctccggcatgatggcatatctggtgttcttaggtccgccgggcgcgggaaaaggtacccaatcgaaacgcattcaggaaaagactggcatcccacatattagcacgggcgatatcttccgtgacatcgtcaagaaagagaacgatgaactgggcaagaagattaaagaaatcatggagaaaggtgaactcgttccagatgaactggtgaataacgtagttaaacgccgcctgtcggagaaagactgcgaaaaaggctttattttggatggttatccgcgtaccgttgctcaagcggaattcctggacagttttcttgaatcccagaacaaacagttgacagccgccgtgctgttcaaagtccccgaagatgttgttgtgcaacgtttaacctctcgcctgatctgtccgaaatgcgggcgtatctacaatatgatttcactgccaccaaaagaagacgagctgtgtgacgattgcaaagtcaaattagtacagcgtgatgatgataaggaagaaacggttcgtcaccgcctgaaagtctaccttgagaagacccagccggtcattgactattatggcaaggccggtattctgaaacgcgtagatgggtcgcaaggaatcgacaacgttgttgcagaagtcctgaagattattggttggagcgataag

SEQ ID NO: 156 - protein, 231 aa, synthetic construct
  REGION 1..231: note = Variant of adenylate kinase
MHHHHHHGGSGMMAYLVFLGPPGAGKGTQSKRIQEKTGIPHISTGDIFRDIVKKENDELGKKIKEIMEKGELVPDELVNNVVKRRLSEKDCEKGFILDGYPRTVAQAEFLDSFLESQNKQLTAAVLFKVPEDVVVQRLTSRLICPKCGRIYNMISLPPKEDELCDDCKVKLVQRDDDKEETVRHRLKVYLEKTQPVIDYYGKAGILKRVDGSQGIDNVVAEVLKIIGWSDK

SEQ ID NO: 157 - DNA, 693 bp, synthetic construct
  misc_feature 1..693: note = Variant of adenylate kinase
  source 1..693: mol_type = other DNA
atgcaccatcatcaccatcacgggggctccggcatgatggcatatctggtgttcttaggtccgccgggcgcgggaaaaggtacccaatcgaaacgcattcaggaaaagactggcatctgccatattggtacgggcgatatcttccgtgacatcgtcaagaaagagaacgatgaactgggcaagaagattaaagaaatcatggagaaaggtgaactcgttccagatgaactggtgaatgaggtagtaaaacgccgcctgtcggagaaagactgcgaaaaaggctttattttggatggttatccgcgtaccgttgctcaagcggaattcctggacagttttcttgaatcccagaacaaacagttgacagccgccgtgctgttcaaagtccccgaagatgttgttgtgcaacgtttaacctctcgcctgatctgtccgaaatgcgggcgtatctacaatatgatttcactgccaccaaaagaagacgagctgtgtgacgattgcaaagtcaaattagtacagcgtgatgatgataaggaagaaacggttcgtcaccgcctgaaagtctaccttgagaagacccagccggtcattgactattatggcaagaaaggtattctcaaacgcgtagatgggtcgcaaggaatcgacaacgttgttgcagaagtcctgaagattattggttggagcgataag

SEQ ID NO: 158 - protein, 231 aa, synthetic construct
  REGION 1..231: note = Variant of adenylate kinase
MHHHHHHGGSGMMAYLVFLGPPGAGKGTQSKRIQEKTGICHIGTGDIFRDIVKKENDELGKKIKEIMEKGELVPDELVNEVVKRRLSEKDCEKGFILDGYPRTVAQAEFLDSFLESQNKQLTAAVLFKVPEDVVVQRLTSRLICPKCGRIYNMISLPPKEDELCDDCKVKLVQRDDDKEETVRHRLKVYLEKTQPVIDYYGKKGILKRVDGSQGIDNVVAEVLKIIGWSDK

SEQ ID NO: 159 - DNA, 693 bp, synthetic construct
  misc_feature 1..693: note = Variant of adenylate kinase
  source 1..693: mol_type = other DNA
atgcaccatcatcaccatcacgggggctccggcatgatggcatatctggtgttcttaggtccgccgggcgcgggaaaaggtacccaatcgaaacgcattcaggaaaagactggcacgccacatattagcacgggcgatatcttccgtgacatcgtcaagaaagagaacgatgaactgggcaagaagattaaagaaatcatggagaaaggtgaactcgttccagatgaactggtgaatgaggtagtaaaacgccgcctgtcggagaaagactgcgaaaaaggctttattttggatggttatccgcgtaccgttgctcaagcggaattcctggacagttttcttgaatcccagaacaaacagttgacagccgccgtgctgttcaaagtccccgaagatgttgttgtgcaacgtttaacctctcgcctgatctgtccgaaatgcgggcgtatctacaatatgatttcactgccaccaaaagaagacgagctgtgtgacgattgcaaagtcaaattagtacagcgtgatgatgataaggaagaaacggttcgtcaccgcctgaaagtctaccttgagaagacccagccggtcattgactattatggcaagaaaggtattctcaaacgcgtagatgggtcgcaaggaatcgacaacgttgttgcagaagtcctgaagattattggttggagcgataag

SEQ ID NO: 160 - protein, 231 aa, synthetic construct
  REGION 1..231: note = Variant of adenylate kinase
MHHHHHHGGSGMMAYLVFLGPPGAGKGTQSKRIQEKTGTPHISTGDIFRDIVKKENDELGKKIKEIMEKGELVPDELVNEVVKRRLSEKDCEKGFILDGYPRTVAQAEFLDSFLESQNKQLTAAVLFKVPEDVVVQRLTSRLICPKCGRIYNMISLPPKEDELCDDCKVKLVQRDDDKEETVRHRLKVYLEKTQPVIDYYGKKGILKRVDGSQGIDNVVAEVLKIIGWSDK

SEQ ID NO: 161 - DNA, 693 bp, synthetic construct
  misc_feature 1..693: note = Variant of adenylate kinase
  source 1..693: mol_type = other DNA
atgcaccatcatcaccatcacgggggctccggcatgatggcatatctggtgttcttaggtccgccgggcgcgggaaaaggtacccaatcgaaacgcattcaggaaaagactggcatcccacatattagcacgggcgatatcttccgtgacatcgtcaagaaagagaacgatgaactgggcaagagtattaaagaaatcatggagaaaggtgaactcgttccagatgaactggtgaatgaggtagtaaaacgccgcctgtcggagaaagactgcgaaaaaggctttattttggatggttatccgcgtaccgttgctcaagcggaattcctggacagttttcttgaatcccagaacaaacagttgacagccgccgtgctgttcaaagtccccgaagatgttgttgtgcaacgtttaacctctcgcctgatctgtccgaaatgcgggcgtatctacaatatgatttcactgccaccaaaagaagacgagctgtgtgacgattgcaaagtcaaattagtacagcgtgatgatgataaggaagaaacggttcgtcaccgcctgaaagtctaccttgagaagacccagccggtcattgactattatggcaagaaaggtattctcaaacgcgtagatgggtcgcaaggaatcgacaacgttgttgcagaagtcctgaagattattggttggagcgataag

SEQ ID NO: 162 - protein, 231 aa, synthetic construct
  REGION 1..231: note = Variant of adenylate kinase
MHHHHHHGGSGMMAYLVFLGPPGAGKGTQSKRIQEKTGIPHISTGDIFRDIVKKENDELGKSIKEIMEKGELVPDELVNEVVKRRLSEKDCEKGFILDGYPRTVAQAEFLDSFLESQNKQLTAAVLFKVPEDVVVQRLTSRLICPKCGRIYNMISLPPKEDELCDDCKVKLVQRDDDKEETVRHRLKVYLEKTQPVIDYYGKKGILKRVDGSQGIDNVVAEVLKIIGWSDK

SEQ ID NO: 163 - DNA, 693 bp, synthetic construct
  misc_feature 1..693: note = Variant of adenylate kinase
  source 1..693: mol_type = other DNA
atgcaccatcatcaccatcacgggggctccggcatgatggcatatctggtgttcttaggtccgccgggcgcgggaaaaggtacccaatcgaaacgcattcaggaaaagactggcatcttgcatattagcacgggcgatatcttccgtgacatcgtcaagaaagagaacgatgaactgggcaagaagattaaagaaatcatggagaaaggtgaactcgttccagatgaactggtgaatgaggtagtaaaacgccgcctgtcggagaaagactgcgaaaaaggctttattttggatggttatccgcgtaccgttgctcaagcggaattcctggacagttttcttgaatcccagaacaaacagttgacagccgccgtgctgttcaaagtccccgaagatgttgttgtgcaacgtttaacctctcgcctgatctgtccgaaatgcgggcgtatctacaatatgatttcactgccaccaaaagaagacgagctgtgtgacgattgcaaagtcaaattagtacagcgtgatgatgataaggaagaaacggttcgtcaccgcctgaaagtctaccttgagaagacccagccggtcattgactattatggcaagaaaggtattctcaaacgcgtagatgggtcgcaaggaatcgacaacgttgttgcagaagtcctgaagattattggttggagcgataag

SEQ ID NO: 164 - protein, 231 aa, synthetic construct
  REGION 1..231: note = Variant of adenylate kinase
MHHHHHHGGSGMMAYLVFLGPPGAGKGTQSKRIQEKTGILHISTGDIFRDIVKKENDELGKKIKEIMEKGELVPDELVNEVVKRRLSEKDCEKGFILDGYPRTVAQAEFLDSFLESQNKQLTAAVLFKVPEDVVVQRLTSRLICPKCGRIYNMISLPPKEDELCDDCKVKLVQRDDDKEETVRHRLKVYLEKTQPVIDYYGKKGILKRVDGSQGIDNVVAEVLKIIGWSDK

SEQ ID NO: 165 - DNA, 693 bp, synthetic construct
  misc_feature 1..693: note = Variant of adenylate kinase
  source 1..693: mol_type = other DNA
atgcaccatcatcaccatcacgggggctccggcatgatggcatatctggtgttcttaggtccgccgggcgcgggaaaaggtacccaatcgaaacgcattcaggaaaagactggcatcccacatattagcacgggcgatatcttccgtgacatcgtcaagaaacagaacgatgaactgggcaagaagattaaagaaatcatggagaaaggtgaactcgttccagatgaactggtgaatgaggtagtaaaacgccgcctgtcggagaaagactgcgaaaaaggctttattttggatggttatccgcgtaccgttgctcaagcggaattcctggacagttttcttgaatcccagaacaaacagttgacagccgccgtgctgttcaaagtccccgaagatgttgttgtgcaacgtttaacctctcgcctgatctgtccgaaatgcgggcgtatctacaatatgatttcactgccaccaaaagaagacgagctgtgtgacgattgcaaagtcaaattagtacagcgtgatgatgataaggaagaaacggttcgtcaccgcctgaaagtctaccttgagaagacccagccggtcattgactattatggcaagaaaggtattctcaaacgcgtagatgggtcgcaaggaatcgacaacgttgttgcagaagtcctgaagattattggttggagcgataag

SEQ ID NO: 166 - protein, 231 aa, synthetic construct
  REGION 1..231: note = Variant of adenylate kinase
MHHHHHHGGSGMMAYLVFLGPPGAGKGTQSKRIQEKTGIPHISTGDIFRDIVKKQNDELGKKIKEIMEKGELVPDELVNEVVKRRLSEKDCEKGFILDGYPRTVAQAEFLDSFLESQNKQLTAAVLFKVPEDVVVQRLTSRLICPKCGRIYNMISLPPKEDELCDDCKVKLVQRDDDKEETVRHRLKVYLEKTQPVIDYYGKKGILKRVDGSQGIDNVVAEVLKIIGWSDK

SEQ ID NO: 167 - DNA, 693 bp, synthetic construct
  misc_feature 1..693: note = Variant of adenylate kinase
  source 1..693: mol_type = other DNA
atgcaccatcatcaccatcacgggggctccggcatgatggcatatctggtgttcttaggtccgccgggcgcgggaaaaggtacccaatcgaaacgcattcaggaaaagactggcatcccacatattagcacgggcgatatcttccgtgacatcgtcaagaaagagaacgatgaactgggcaagaagattaaagaaatcatggagaaaggtgaactcgttccagatgaactggtgaatgaggtagtaaaacgccgcctgtcggagaaagactgcgaaaaaggctttattttggatggttatccgcgtaccgttgctcaagcggaattctgtgacagttttcttgaatcccagaacaaacagttgacagccgccgtgctgttcaaagtccccgaagatgttgttgtgcaacgtttaacctctcgcctgatctgtccgaaatgcgggcgtatctacaatatgatttcactgccaccaaaagaagacgagctgtgtgacgattgcaaagtcaaattagtacagcgtgatgatgataaggaagaaacggttcgtcaccgcctgaaagtctaccttgagaagacccagccggtcattgactattatggcaagaaaggtattctcaaacgcgtagatgggtcgcaaggaatcgacaacgttgttgcagaagtcctgaagattattggttggagcgataag

SEQ ID NO: 168 - protein, 231 aa, synthetic construct
  REGION 1..231: note = Variant of adenylate kinase
MHHHHHHGGSGMMAYLVFLGPPGAGKGTQSKRIQEKTGIPHISTGDIFRDIVKKENDELGKKIKEIMEKGELVPDELVNEVVKRRLSEKDCEKGFILDGYPRTVAQAEFCDSFLESQNKQLTAAVLFKVPEDVVVQRLTSRLICPKCGRIYNMISLPPKEDELCDDCKVKLVQRDDDKEETVRHRLKVYLEKTQPVIDYYGKKGILKRVDGSQGIDNVVAEVLKIIGWSDK

SEQ ID NO: 169 - DNA, 693 bp, synthetic construct
  misc_feature 1..693: note = Variant of adenylate kinase
  source 1..693: mol_type = other DNA
atgcaccatcatcaccatcacgggggctccggcatgatggcatatctggtgttcttaggtccgccgggcgcgggaaaaggtacccaatcgaaacgcattcaggaaaagactggcatcccacatattagcacgggcgatatcttccgtgacagggtcaagaaagagaacgatgaacggggcaagaagattaaagaaatcatggagaaaggtgaactcgttccagatgaactggtgaatgaggtagtaaaacgccgcctgtcggagaaagactgcgaaaaaggctttattttggatggttatccgcgtaccgttgctcaagcggaattcctggacagttttcttgaatcccagaacaaacagttgacagccgccgtgctgttcaaagtccccgaagatgttgttgtgcaacgtttaacctctcgcctgatctgtccgaaatgcgggcgtatctacaatatgatttcactgccaccaaaagaagacgagctgtgtgacgattgcaaagtcaaattagtacagcgtgatgatgataaggaagaaacggttcgtcaccgcctgaaagtctaccttgagaagacccagccggtcattgactattatggcaagaaaggtattctcaaacgcgtagatgggtcgcaaggaatcgacaacgttgttgcagaagtcctgaagattattggttggagcgataag

SEQ ID NO: 170 - protein, 231 aa, synthetic construct
  REGION 1..231: note = Variant of adenylate kinase
MHHHHHHGGSGMMAYLVFLGPPGAGKGTQSKRIQEKTGIPHISTGDIFRDRVKKENDERGKKIKEIMEKGELVPDELVNEVVKRRLSEKDCEKGFILDGYPRTVAQAEFLDSFLESQNKQLTAAVLFKVPEDVVVQRLTSRLICPKCGRIYNMISLPPKEDELCDDCKVKLVQRDDDKEETVRHRLKVYLEKTQPVIDYYGKKGILKRVDGSQGIDNVVAEVLKIIGWSDK

SEQ ID NO: 171 - DNA, 693 bp, synthetic construct
  misc_feature 1..693: note = Variant of adenylate kinase
  source 1..693: mol_type = other DNA
atgcaccatcatcaccatcacgggggctccggcatgatggcatatctggtgttcttaggtccgccgggcgcgggaaaaggtacccaatcgaaacgcattcaggaaaagactggcatcccacatattagcacgggcgatatcttccgtgacatcgttaagaaagagaacgatgaactgggcaagaagattaaagaaatcatggagaaaggtgaactcgttccagatgaactggtgaatgaggtagtaaaacgccgcctgtcggagaaagactgcgaaaaaggctttattttggatggttatccgcgtaccgttgctcaagcggaattcctggatagttttcttgaatcccagaacaaacagttgacagccgccgtgctgttcaaagtccccgaagatgttgttgtgcaacgtttaacctctcgcctgatctgtccgaaatgcgggcgtatctacaacatgatttttctgccaccaaaagaagacgagctgtgtgacgattgcaaagtcaaattagtacagcgtgatgatgataaggaagaaacggttcgtcaccgcctgaaagtctaccttgagaagacccagccggtcattgactattatggcaagaaaggtattctcaaacgcgtagatgggtcgcaaggaatcgacaacgttgttgcagaagtcctgaagattctgggttggagcgataag

SEQ ID NO: 172 - protein, 231 aa, synthetic construct
  REGION 1..231: note = Variant of adenylate kinase
MHHHHHHGGSGMMAYLVFLGPPGAGKGTQSKRIQEKTGIPHISTGDIFRDIVKKENDELGKKIKEIMEKGELVPDELVNEVVKRRLSEKDCEKGFILDGYPRTVAQAEFLDSFLESQNKQLTAAVLFKVPEDVVVQRLTSRLICPKCGRIYNMIFLPPKEDELCDDCKVKLVQRDDDKEETVRHRLKVYLEKTQPVIDYYGKKGILKRVDGSQGIDNVVAEVLKILGWSDK

SEQ ID NO: 173 - DNA, 693 bp, synthetic construct
  misc_feature 1..693: note = Variant of adenylate kinase
  source 1..693: mol_type = other DNA
atgcaccatcatcaccatcacgggggctccggcatgatggcatatctggtgttcttaggtccgccgggcgcgggaaaaggtacccaatcgaaacgcattcaggaaaagactggcatcccacatattagcacgggcgatatcttccgtgacatcgtcaagaaagagaacgatgaactgggcaagaagattaaagaaatcatggagaaaggtgaactcgttccagatgaactggtgaataacgtagttaaacgccgcctgtcggagaaagactgcgaaaaaggctttattttggatggttatccgcgtaccgttgctcaagcggaattcctggacagttttcttgaatcccagaacaaacagttgacagccgccgtgctgttcaaagtccccgaagatgttgttgtgcaacgtttaacctctcgcctgatctgtccgaaatgcgggcgtatctacaatatgatttcactgccaccaaaagaagacgagctgtgtgacgattgcaaagtcaaattagtacagcgtgatgatgataaggaagaaacggttcgtcaccgcctgaaagtctaccttgagaagacccagccggtcattgactattatggcaagaaaggtattctgaaacgcgtagatgggtcgcaaggaatcgacaacgttgttgcagaagtcctgaagattattggttggagcgataag

SEQ ID NO: 174 - protein, 231 aa, synthetic construct
  REGION 1..231: note = Variant of adenylate kinase
MHHHHHHGGSGMMAYLVFLGPPGAGKGTQSKRIQEKTGIPHISTGDIFRDIVKKENDELGKKIKEIMEKGELVPDELVNNVVKRRLSEKDCEKGFILDGYPRTVAQAEFLDSFLESQNKQLTAAVLFKVPEDVVVQRLTSRLICPKCGRIYNMISLPPKEDELCDDCKVKLVQRDDDKEETVRHRLKVYLEKTQPVIDYYGKKGILKRVDGSQGIDNVVAEVLKIIGWSDK

SEQ ID NO: 175 - DNA, 693 bp, synthetic construct
  misc_feature 1..693: note = Variant of adenylate kinase
  source 1..693: mol_type = other DNA
atgcaccatcatcaccatcacgggggctccggcatgatggcatatctggtgttcttaggtccgccgggcgcgggaaaaggtacccaatcgaaacgcattcaggaaaagactggcatcccacatattagcacgggcgatatcttccgtgacatcgtcaagaaagagaacgatgaactgggcaagaagattaaagaaatcatggagaaaggtgaactcgttccagatgaactggtgaatgaggtagtaaaacgccgcctgtcggagaaagactgcgaaaaaggctttattttggatggttatccgcgtaccgttgctcaagcggaattcctggacagttttcttgaatcccagaacaaacagttgacagccgccgtgctgttcaaagtccccgaagatgttgttgtgcaacgtttaacctctcgcctgatctgtccgaaatgcgggcgtatctacaatatgatttcactgccaccaaaagaagacgagctgtgtgacgattgcaaagtcaaattagtacagcgtgatgatgataaggaagaaacggttcgtcaccgcctgaaagtctaccttgagaagacccagccggtcattgactattatggcaagaaaggtattctcaaacgcgtagatgggtcgcaaggaatcgacaacgttacggcagaagtcctgaagattattggttggagcgataag

SEQ ID NO: 176 - protein, 231 aa, synthetic construct
  REGION 1..231: note = Variant of adenylate kinase
MHHHHHHGGSGMMAYLVFLGPPGAGKGTQSKRIQEKTGIPHISTGDIFRDIVKKENDELGKKIKEIMEKGELVPDELVNEVVKRRLSEKDCEKGFILDGYPRTVAQAEFLDSFLESQNKQLTAAVLFKVPEDVVVQRLTSRLICPKCGRIYNMISLPPKEDELCDDCKVKLVQRDDDKEETVRHRLKVYLEKTQPVIDYYGKKGILKRVDGSQGIDNVTAEVLKIIGWSDK

SEQ ID NO: 177 - DNA, 693 bp, synthetic construct
  misc_feature 1..693: note = Variant of adenylate kinase
  source 1..693: mol_type = other DNA
atgcaccatcatcaccatcacgggggctccggcatgatggcatatctggtgttcttaggtccgccgggcgcgggaaaaggtacccaatcgaaacgcattcaggaaaagactggcatcccacatattagcacgggcgatatcttccgtgacatcgtcaagaaagagaacgatgaactgggcaagaagattaaagaaatcatggagaaaggtgaactcgttccagatgaactggtgaatgaggtagtaaaacgccgcctgtcggagaaagactgcgaaaaaggctttattttggatggttatccgcgtaccgttgctcaagcggaattcctggacagttttcttgaatcccagaacaaacagttgacagccgccgtgctgttcaaagtccccgaagatgttgttgtgcaacgtttaacctctcgcctgatctgtccgaaatgcgggcgtatctacaatatgatttcactgccaccaaaagaagacgagctgtgtgacccgtgcaaagtcaaattagtacagcgtgatgatgataaggaagaaacggttcgtcaccgcctgaaagtctaccttgagaagacccagccggtcattgactattatggcaagaaaggtattctcaaacgcgtagatgggtcgcaaggaatcgacaacgttgttgcagaagtcctgaagattattggttggagcgataag

SEQ ID NO: 178 - protein, 231 aa, synthetic construct
  REGION 1..231: note = Variant of adenylate kinase
MHHHHHHGGSGMMAYLVFLGPPGAGKGTQSKRIQEKTGIPHISTGDIFRDIVKKENDELGKKIKEIMEKGELVPDELVNEVVKRRLSEKDCEKGFILDGYPRTVAQAEFLDSFLESQNKQLTAAVLFKVPEDVVVQRLTSRLICPKCGRIYNMISLPPKEDELCDPCKVKLVQRDDDKEETVRHRLKVYLEKTQPVIDYYGKKGILKRVDGSQGIDNVVAEVLKIIGWSDK

SEQ ID NO: 179 - DNA, 693 bp, synthetic construct
  misc_feature 1..693: note = Variant of adenylate kinase
  source 1..693: mol_type = other DNA
atgcaccatcatcaccatcacgggggctccggcatgatggcatatctggtgttcttaggtccgccgggcgcgggaaaaggtacccaatcgaaacgcattcaggaaaagactggcatcccacatattagcacgggcgatatcttccgtgacatcgtcaagaaagagaacgatgaactgcctaagaagattaaagaaatcatggagaaaggtgaactcgttccagatgaactggtgaatgaggtagtaaaacgccgcctgtcggagaaagactgcgaaaaaggctttattttggatggttatccgcgtaccgttgctcaagcggaattcctggacagttttcttgaatcccagaacaaacagttgacagccgccgtgctgttcaaagtccccgaagatgttgttgtgcaacgtttaacctctcgcctgatctgtccgaaatgcgggcgtatctacaatatgatttcactgccaccaaaagaagacgagctgtgtgacgattgcaaagtcaaattagtacagcgtgatgatgataaggaagaaacggttcgtcaccgcctgaaagtctaccttgagaagacccagccggtcattgactattatggcaagaaaggtattctcaaacgcgtagatgggtcgcaaggaatcgacaacgttgttgcagaagtcctgaagattattggttggagcgataag

SEQ ID NO: 180 - protein, 231 aa, synthetic construct
  REGION 1..231: note = Variant of adenylate kinase
MHHHHHHGGSGMMAYLVFLGPPGAGKGTQSKRIQEKTGIPHISTGDIFRDIVKKENDELPKKIKEIMEKGELVPDELVNEVVKRRLSEKDCEKGFILDGYPRTVAQAEFLDSFLESQNKQLTAAVLFKVPEDVVVQRLTSRLICPKCGRIYNMISLPPKEDELCDDCKVKLVQRDDDKEETVRHRLKVYLEKTQPVIDYYGKKGILKRVDGSQGIDNVVAEVLKIIGWSDK

SEQ ID NO: 181 - DNA, 693 bp, synthetic construct
  misc_feature 1..693: note = Variant of adenylate kinase
  source 1..693: mol_type = other DNA
atgcaccatcatcaccatcacgggggctccggcatgatggcatatctggtgttcttaggtccgccgggcgcgggaaaaggtacccaatcgaaacgcattcaggaaaagactggcatcccacatattagcacgggcgatatcttccgtgacatcgtcaagaaagagaacgatgaactgggcaagaagattaaagaaatcatggagaaaggtgaactcgttccagatgaactggtgaatgaggtagtaaaacgccgcctgtcggagaaagactgcgaaaaaggctttattttggatggttatccgcgtaccgttgctcaagcggaattcctggacagttttcttgaatcccagaacaaacagttgacagccgccgtgctgttcaaagtccccgaagatgttgttgtgcaacgtttaacctctcgcctgatctgtccgaaatgcgggcgtatctacaatatgatttcactgccaccaaaagaagacgagctgtgtgacgattgcaaagtcaaattagtacagcgtgatgatgataaggaagaaacggttcgtcaccgcctgaaagtctaccttgagaagacccagccggtcattgactattatggctctaaaggtattctcaaacgcgtagatgggtcgcaaggaatcgacaacgttgttgcagaagtcctgaagattattggttggagcgataag

SEQ ID NO: 182 - protein, 231 aa, synthetic construct
  REGION 1..231: note = Variant of adenylate kinase
MHHHHHHGGSGMMAYLVFLGPPGAGKGTQSKRIQEKTGIPHISTGDIFRDIVKKENDELGKKIKEIMEKGELVPDELVNEVVKRRLSEKDCEKGFILDGYPRTVAQAEFLDSFLESQNKQLTAAVLFKVPEDVVVQRLTSRLICPKCGRIYNMISLPPKEDELCDDCKVKLVQRDDDKEETVRHRLKVYLEKTQPVIDYYGSKGILKRVDGSQGIDNVVAEVLKIIGWSDK

SEQ ID NO: 183 - DNA, 693 bp, synthetic construct
  misc_feature 1..693: note = Variant of adenylate kinase
  source 1..693: mol_type = other DNA
atgcaccatcatcaccatcacgggggctccggcatgatggcatatctggtgttcttaggtccgccgggcgcgggaaaaggtacccaatcgaaacgcattcaggaaaagactggcatcccacatattagcacgggcgatatcttccgtgacatcgtcaagaaagagaacgatgaaactggcaagaagattaaagaaatcatggagaaaggtgaactcgttccagatgaactggtgaatgaggtagtaaaacgccgcctgtcggagaaagactgcgaaaaaggctttattttggatggttatccgcgtaccgttgctcaagcggaattcctggacagttttcttgaatcccagaacaaacagttgacagccgccgtgctgttcaaagtccccgaagatgttgttgtgcaacgtttaacctctcgcctgatctgtccgaaatgcgggcgtatctacaatatgatttcactgccaccaaaagaagacgagctgtgtgacgattgcaaagtcaaattagtacagcgtgatgatgataaggaagaaacggttcgtcaccgcctgaaagtctaccttgagaagacccagccggtcattgactattatggcaagaaaggtattctcaaacgcgtagatgggtcgcaaggaatcgacaacgttgttgcagaagtcctgaagattattggttggagcgataag

SEQ ID NO: 184 - protein, 231 aa, synthetic construct
  REGION 1..231: note = Variant of adenylate kinase
MHHHHHHGGSGMMAYLVFLGPPGAGKGTQSKRIQEKTGIPHISTGDIFRDIVKKENDETGKKIKEIMEKGELVPDELVNEVVKRRLSEKDCEKGFILDGYPRTVAQAEFLDSFLESQNKQLTAAVLFKVPEDVVVQRLTSRLICPKCGRIYNMISLPPKEDELCDDCKVKLVQRDDDKEETVRHRLKVYLEKTQPVIDYYGKKGILKRVDGSQGIDNVVAEVLKIIGWSDK

SEQ ID NO: 185 - DNA, 693 bp, synthetic construct
  misc_feature 1..693: note = Variant of adenylate kinase
  source 1..693: mol_type = other DNA
atgcaccatcatcaccatcacgggggctccggcatgatggcatatctggtgttcttaggtccgccgggcgcgggaaaaggtacccaatcgaaacgcattcaggaaaagactggcatcccacatattagcacgggcgatatcttccgtgacatcgtcaagaaagagaacgatgaactgggcaagaagattaaagaaatcatggagaaaggtgaactcgttccagatgaactggtgaatgctgtagtaaaacgccgcctgtcggagaaagactgcgaaaaaggctttattttggatggttatccgcgtaccgttgctcaagcggaattcctggacagttttcttgaatcccagaacaaacagttgacagccgccgtgctgttcaaagtccccgaagatgttgttgtgcaacgtttaacctctcgcctgatctgtccgaaatgcgggcgtatctacaatatgatttcactgccaccaaaagaagacgagctgtgtgacgattgcaaagtcaaattagtacagcgtgatgatgataaggaagaaacggttcgtcaccgcctgaaagtctaccttgagaagacccagccggtcattgactattatggcaagaaaggtattctcaaacgcgtagatgggtcgcaaggaatcgacaacgttgttgcagaagtcctgaagattattggttggagcgataag

SEQ ID NO: 186 - protein, 231 aa, synthetic construct
  REGION 1..231: note = Variant of adenylate kinase
MHHHHHHGGSGMMAYLVFLGPPGAGKGTQSKRIQEKTGIPHISTGDIFRDIVKKENDELGKKIKEIMEKGELVPDELVNAVVKRRLSEKDCEKGFILDGYPRTVAQAEFLDSFLESQNKQLTAAVLFKVPEDVVVQRLTSRLICPKCGRIYNMISLPPKEDELCDDCKVKLVQRDDDKEETVRHRLKVYLEKTQPVIDYYGKKGILKRVDGSQGIDNVVAEVLKIIGWSDK

SEQ ID NO: 187 - DNA, 693 bp, synthetic construct
  misc_feature 1..693: note = Variant of adenylate kinase
  source 1..693: mol_type = other DNA
atgcaccatcatcaccatcacgggggctccggcatgatggcatatctggtgttcttaggtccgccgggcgcgggaaaaggtacccaatcgaaacgcattcaggaaaagactcttatcccacatattagcacgggcgatatcttccgtgacatcgtcaagaaagagaacgatgaactgggcaagaagattaaagaaatcatggagaaaggtgaactcgttccagatgaactggtgaatgaggtagtaaaacgccgcctgtcggagaaagactgcgaaaaaggctttattttggatggttatccgcgtaccgttgctcaagcggaattcctggacagttttcttgaatcccagaacaaacagttgacagccgccgtgctgttcaaagtccccgaagatgttgttgtgcaacgtttaacctctcgcctgatctgtccgaaatgcgggcgtatctacaatatgatttcactgccaccaaaagaagacgagctgtgtgacgattgcaaagtcaaattagtacagcgtgatgatgataaggaagaaacggttcgtcaccgcctgaaagtctaccttgagaagacccagccggtcattgactattatggcaagaaaggtattctcaaacgcgtagatgggtcgcaaggaatcgacaacgttgttgcagaagtcctgaagattattggttggagcgataag

SEQ ID NO: 188 - protein, 231 aa, synthetic construct
  REGION 1..231: note = Variant of adenylate kinase
MHHHHHHGGSGMMAYLVFLGPPGAGKGTQSKRIQEKTLIPHISTGDIFRDIVKKENDELGKKIKEIMEKGELVPDELVNEVVKRRLSEKDCEKGFILDGYPRTVAQAEFLDSFLESQNKQLTAAVLFKVPEDVVVQRLTSRLICPKCGRIYNMISLPPKEDELCDDCKVKLVQRDDDKEETVRHRLKVYLEKTQPVIDYYGKKGILKRVDGSQGIDNVVAEVLKIIGWSDK

SEQ ID NO: 189 - DNA, 693 bp, synthetic construct
  misc_feature 1..693: note = Variant of adenylate kinase
  source 1..693: mol_type = other DNA
atgcaccatcatcaccatcacgggggctccggcatgatggcatatctggtgttcttaggtccgccgggcgcgggaaaaggtacccaatcgaaacgcattcaggaaaagactggcatcccacatattagcacgggcgatatcttccgtgacatcgtcaagaaagagaacgatgaactgggcaagaagattaaagaaatcatggagaaaggtgaactcgttccagatgaactggtgaatgaggtagtaaaacgccgcctgtcggagaaagactgcgaaaaatgttttattttggatggttatccgcgtaccgttgctcaagcggaattcctggacagttttcttgaatcccagaacaaacagttgacagccgccgtgctgttcaaagtccccgaagatgttgttgtgcaacgtttaacctctcgcctgatctgtccgaaatgcgggcgtatctacaatatgatttcactgccaccaaaagaagacgagctgtgtgacgattgcaaagtcaaattagtacagcgtgatgatgataaggaagaaacggttcgtcaccgcctgaaagtctaccttgagaagacccagccggtcattgactattatggcaagaaaggtattctcaaacgcgtagatgggtcgcaaggaatcgacaacgttgttgcagaagtcctgaagattattggttggagcgataag

SEQ ID NO: 190 - protein, 231 aa, synthetic construct
  REGION 1..231: note = Variant of adenylate kinase
MHHHHHHGGSGMMAYLVFLGPPGAGKGTQSKRIQEKTGIPHISTGDIFRDIVKKENDELGKKIKEIMEKGELVPDELVNEVVKRRLSEKDCEKCFILDGYPRTVAQAEFLDSFLESQNKQLTAAVLFKVPEDVVVQRLTSRLICPKCGRIYNMISLPPKEDELCDDCKVKLVQRDDDKEETVRHRLKVYLEKTQPVIDYYGKKGILKRVDGSQGIDNVVAEVLKIIGWSDK

SEQ ID NO: 191 - DNA, 693 bp, synthetic construct
  misc_feature 1..693: note = Variant of adenylate kinase
  source 1..693: mol_type = other DNA
atgcaccatcatcaccatcacgggggctccggcatgatggcatatctggtgttcttaggtccgccgggcgcgggaaaaggtacccaatcgaaacgcattcaggaaaagactggcatcccacatattagcacgggcgatatcttccgtgacatcgtcaagaaagagaacgatgaactgggcaaggcgattaaagaaatcatggagaaaggtgaactcgttccagatgaactggtgaatgaggtagtaaaacgccgcctgtcggagaaagactgcgaaaaaggctttattttggatggttatccgcgtaccgttgctcaagcggaattcctggacagttttcttgaatcccagaacaaacagttgacagccgccgtgctgttcaaagtccccgaagatgttgttgtgcaacgtttaacctctcgcctgatctgtccgaaatgcgggcgtatctacaatatgatttcactgccaccaaaagaagacgagctgtgtgacgattgcaaagtcaaattagtacagcgtgatgatgataaggaagaaacggttcgtcaccgcctgaaagtctaccttgagaagacccagccggtcattgactattatggcaagaaaggtattctcaaacgcgtagatgggtcgcaaggaatcgacaacgttgttgcagaagtcctgaagattattggttggagcgataag

SEQ ID NO: 192 - protein, 231 aa, synthetic construct
  REGION 1..231: note = Variant of adenylate kinase
MHHHHHHGGSGMMAYLVFLGPPGAGKGTQSKRIQEKTGIPHISTGDIFRDIVKKENDELGKAIKEIMEKGELVPDELVNEVVKRRLSEKDCEKGFILDGYPRTVAQAEFLDSFLESQNKQLTAAVLFKVPEDVVVQRLTSRLICPKCGRIYNMISLPPKEDELCDDCKVKLVQRDDDKEETVRHRLKVYLEKTQPVIDYYGKKGILKRVDGSQGIDNVVAEVLKIIGWSDK

SEQ ID NO: 193 - DNA, 693 bp, synthetic construct
  misc_feature 1..693: note = Variant of adenylate kinase
  source 1..693: mol_type = other DNA
atgcaccatcatcaccatcacgggggctccggcatgatggcatatctggtgttcttaggtccgccgggcgcgggaaaaggtacccaatcgaaacgcattcaggaaaagactggcatcccacatattagcacgggcgatatcttccgtgacaaggtcaagaaagagaacgatgaactgggcaagaagattaaagaaatcatggagaaaggtgaactcgttccagatgaactggtgaatgaggtagtaaaacgccgcctgtcggagaaagactgcgaaaaaggctttattttggatggttatccgcgtaccgttgctcaagcggaattcctggacagttttcttgaatcccagaacaaacagttgacagccgccgtgctgttcaaagtccccgaagatgttgttgtgcaacgtttaacctctcgcctgatctgtccgaaatgcgggcgtatctacaatatgatttcactgccaccaaaagaagacgagctgtgtgacgattgcaaagtcaaattagtacagcgtgatgatgataaggaagaaacggttcgtcaccgcctgaaagtctaccttgagaagacccagccggtcattgactattatggcaagaaaggtattctcaaacgcgtagatgggtcgcaaggaatcgacaacgttgttgcagaagtcctgaagattattggttggagcgataag

SEQ ID NO: 194 - protein, 231 aa, synthetic construct
  REGION 1..231: note = Variant of adenylate kinase
MHHHHHHGGSGMMAYLVFLGPPGAGKGTQSKRIQEKTGIPHISTGDIFRDKVKKENDELGKKIKEIMEKGELVPDELVNEVVKRRLSEKDCEKGFILDGYPRTVAQAEFLDSFLESQNKQLTAAVLFKVPEDVVVQRLTSRLICPKCGRIYNMISLPPKEDELCDDCKVKLVQRDDDKEETVRHRLKVYLEKTQPVIDYYGKKGILKRVDGSQGIDNVVAEVLKIIGWSDK

SEQ ID NO: 195 - DNA, 693 bp, synthetic construct
  misc_feature 1..693: note = Variant of adenylate kinase
  source 1..693: mol_type = other DNA
atgcaccatcatcaccatcacgggggctccggcatgatggcatatctggtgttcttaggtccgccgggcgcgggaaaaggtacccaatcgaaacgcattcaggaaaagactggcatcccacatattagcacgggcgatatcttccgtgacatcgtcaagaaagagaacgatgaactgggcaagaagattaaagaaatcatggagaaaggtgaactcgttccagatgaactggtgaatgaggtagtaaaacgccgcctgtcggagaaagagtgcgaaaaaggctttattttggatggttatccgcgtaccgttgctcaagcggaattcctggacagttttcttgaatcccagaacaaacagttgacagccgccgtgctgttcaaagtccccgaagatgttgttgtgcaacgtttaacctctcgcctgatctgtccgaaatgcgggcgtatctacaatatgatttcactgccaccaaaagaagacgagctgtgtgacgattgcaaagtcaaattagtacagcgtgatgatgataaggaagaaacggttcgtcaccgcctgaaagtctaccttgagaagacccagccggtcattgactattatggcaagaaaggtattctcaaacgcgtagatgggtcgcaaggaatcgacaacgttgttgcagaagtcctgaagattattggttggagcgataag

SEQ ID NO: 196 - protein, 231 aa, synthetic construct
  REGION 1..231: note = Variant of adenylate kinase
MHHHHHHGGSGMMAYLVFLGPPGAGKGTQSKRIQEKTGIPHISTGDIFRDIVKKENDELGKKIKEIMEKGELVPDELVNEVVKRRLSEKECEKGFILDGYPRTVAQAEFLDSFLESQNKQLTAAVLFKVPEDVVVQRLTSRLICPKCGRIYNMISLPPKEDELCDDCKVKLVQRDDDKEETVRHRLKVYLEKTQPVIDYYGKKGILKRVDGSQGIDNVVAEVLKIIGWSDK

SEQ ID NO: 197 - DNA, 693 bp, synthetic construct
  misc_feature 1..693: note = Variant of adenylate kinase
  source 1..693: mol_type = other DNA
atgcaccatcatcaccatcacgggggctccggcatgatggcatatctggtgttcttaggtccgccgggcgcgggaaaaggtacccaatcgaaacgcattcaggaaaagactggcatcccacatattagcacgggcgatatcttccgtgacatcgtcaagaaagagaacgatgaaatgggcaagaagattaaagaaatcatggagaaaggtgaactcgttccagatgaactggtgaatgaggtagtaaaacgccgcctgtcggagaaagactgcgaaaaaggctttattttggatggttatccgcgtaccgttgctcaagcggaattcctggacagttttcttgaatcccagaacaaacagttgacagccgccgtgctgttcaaagtccccgaagatgttgttgtgcaacgtttaacctctcgcctgatctgtccgaaatgcgggcgtatctacaatatgatttcactgccaccaaaagaagacgagctgtgtgacgattgcaaagtcaaattagtacagcgtgatgatgataaggaagaaacggttcgtcaccgcctgaaagtctaccttgagaagacccagccggtcattgactattatggcaagaaaggtattctcaaacgcgtagatgggtcgcaaggaatcgacaacgttgttgcagaagtcctgaagattattggttggagcgataag

SEQ ID NO: 198 - protein, 231 aa, synthetic construct
  REGION 1..231: note = Variant of adenylate kinase
MHHHHHHGGSGMMAYLVFLGPPGAGKGTQSKRIQEKTGIPHISTGDIFRDIVKKENDEMGKKIKEIMEKGELVPDELVNEVVKRRLSEKDCEKGFILDGYPRTVAQAEFLDSFLESQNKQLTAAVLFKVPEDVVVQRLTSRLICPKCGRIYNMISLPPKEDELCDDCKVKLVQRDDDKEETVRHRLKVYLEKTQPVIDYYGKKGILKRVDGSQGIDNVVAEVLKIIGWSDK

SEQ ID NO: 199 - DNA, 693 bp, synthetic construct
  misc_feature 1..693: note = Variant of adenylate kinase
  source 1..693: mol_type = other DNA
atgcaccatcatcaccatcacgggggctccggcatgatggcatatctggtgttcttaggtccgccgggcgcgggaaaaggtacccaatcgaaacgcattcaggaaaagactggcatcccacatattagcacgggcgatatcttccgtgacatcgtcaagaaagagaacgatgaactgggcaagaagattaaagaaatcatggagaaaggtgaactcgttccagatgaactggtgaataacgtagttaaacgccgcctgtcggagaaagactgcgaaaaaggctttattttggatggttatccgcgtaccgttgctcaagcggaattcctggacagttttcttgaatcccagaacaaacagttgacagccgccgtgctgttcaaagtccccgaagatgttgttgtgcaacgtttaacctctcgcctgatctgtccgaaatgcgggcgtatctacaatatgatttcactgccaccaaaagaagacgagctgtgtgacgattgcaaagtcaaattagtacagcgtgatgatgataaggaagaaacggttcgtaaacgcctgaaagtctaccttgagaagacccagccggtcattgactattatggcaaggccggtattctgaaacgcgtagatgggtcgcaaggcatcgacaacgttgttgcagaagtcctgaagattattggttggagcgataag

SEQ ID NO: 200 - protein, 231 aa, synthetic construct
  REGION 1..231: note = Variant of adenylate kinase
MHHHHHHGGSGMMAYLVFLGPPGAGKGTQSKRIQEKTGIPHISTGDIFRDIVKKENDELGKKIKEIMEKGELVPDELVNNVVKRRLSEKDCEKGFILDGYPRTVAQAEFLDSFLESQNKQLTAAVLFKVPEDVVVQRLTSRLICPKCGRIYNMISLPPKEDELCDDCKVKLVQRDDDKEETVRKRLKVYLEKTQPVIDYYGKAGILKRVDGSQGIDNVVAEVLKIIGWSDK

SEQ ID NO: 201 - DNA, 693 bp, synthetic construct
  misc_feature 1..693: note = Variant of adenylate kinase
  source 1..693: mol_type = other DNA
atgcaccatcatcaccatcacgggggctccggcatgatggcatatctggtgttcttaggtccgccgggcgcgggaaaaggtacccaatcgaaacgcattcagtctaagactggcatcccacatattagcacgggcgatatcttccgtgacatcgtcaagaaagagaacgatgaactgggcaagaagattaaagaaatcatggagaaaggtgaactcgttccagatgaactggtgaatgaggtagtaaaacgccgcctgtcggagaaagactgcgaaaaaggctttattttggatggttatccgcgtaccgttgctcaagcggaattcctggacagttttcttgaatcccagaacaaacagttgacagccgccgtgctgttcaaagtccccgaagatgttgttgtgcaacgtttaacctctcgcctgatctgtccgaaatgcgggcgtatctacaatatgatttcactgccaccaaaagaagacgagctgtgtgacgattgcaaagtcaaattagtacagcgtgatgatgataaggaagaaacggttcgtcaccgcctgaaagtctaccttgagaagacccagccggtcattgactattatggcaagaaaggtattctcaaacgcgtagatgggtcgcaaggaatcgacaacgttgttgcagaagtcctgaagattattggttggagcgataag

SEQ ID NO: 202 - protein, 231 aa, synthetic construct
  REGION 1..231: note = Variant of adenylate kinase
MHHHHHHGGSGMMAYLVFLGPPGAGKGTQSKRIQSKTGIPHISTGDIFRDIVKKENDELGKKIKEIMEKGELVPDELVNEVVKRRLSEKDCEKGFILDGYPRTVAQAEFLDSFLESQNKQLTAAVLFKVPEDVVVQRLTSRLICPKCGRIYNMISLPPKEDELCDDCKVKLVQRDDDKEETVRHRLKVYLEKTQPVIDYYGKKGILKRVDGSQGIDNVVAEVLKIIGWSDK

SEQ ID NO: 203 - DNA, 693 bp, synthetic construct
  misc_feature 1..693: note = Variant of adenylate kinase
  source 1..693: mol_type = other DNA
atgcaccatcatcaccatcacgggggctccggcatgatggcatatctggtgttcttaggtccgccgggcgcgggaaaaggtacccaatcgaaacgcattcaggaaaagactggcatcccacatattagcacgggcgatatcttccgtgacatcgtcaagaaagagaacgatgaactgggcaagaagattaaagaaatcatggagaaaggtgaactcgttccagatgaactggtgaatgaggtagtaaaacgccgcctgtcggagaaagactgcgaaaaaggctttattttggatggttatccgcgtaccgttgctcaagcggaattcctggacagttttcttgaatcccagaacaaacagttgacagccgccgtgctgttcaaagtccccgaagatgttgttgtgcaacgtttaacctctcgcctgatctgtccgaaatgcgggcgtatctacaatatgatttcactgccaccaaaagaagacgagctgtgtgacgattgcaaagtcaaattagtacagcgtgatgatgataaggaagaaacggttcgtcaccgcctgaaagtctaccttgagaagacccagccggtcattgactattatggcaagaaaggtattctcaaacgcgtagatgggtcgcaaggaatcgacaacgttgttgcagaaactctgaagattattggttggagcgataag

SEQ ID NO: 204 - protein, 231 aa, synthetic construct
  REGION 1..231: note = Variant of adenylate kinase
MHHHHHHGGSGMMAYLVFLGPPGAGKGTQSKRIQEKTGIPHISTGDIFRDIVKKENDELGKKIKEIMEKGELVPDELVNEVVKRRLSEKDCEKGFILDGYPRTVAQAEFLDSFLESQNKQLTAAVLFKVPEDVVVQRLTSRLICPKCGRIYNMISLPPKEDELCDDCKVKLVQRDDDKEETVRHRLKVYLEKTQPVIDYYGKKGILKRVDGSQGIDNVVAETLKIIGWSDK

SEQ ID NO: 205 - DNA, 693 bp, synthetic construct
  misc_feature 1..693: note = Variant of adenylate kinase
  source 1..693: mol_type = other DNA
atgcaccatcatcaccatcacgggggctccggcatgatggcatatctggtgttcttaggtccgccgggcgcgggaaaaggtacccaatcgaaacgcattcaggaaaagactggcatcccacatattagcacgggcgatatcttccgtgacatcgtcaagaaagagaacgatgaactgggcaagaagattaaagaaatcatggagaaaggtgaactcgttccagatgaactggtgaatgaggtagtaaaacgccgcctgtcggagaaagactgcgaaaaaggctttattttggatggttatccgcgtaccgttgctcaagcggaattcctggacagttttcttgaatcccagaacaaacagttgacagccgccgtgctgttcaaagtccccgaagatgttgttgtgcaacgtttaacctctcgcctgatctgtccgaaatgcgggcgtatctacaatatgatttcactgccaccaaaagaagacgagctgtgtgacgattgcaaagtcaaattagtacagcgtgatgatgatggggaagaaacggttcgtcaccgcctgaaagtctaccttgagaagacccagccggtcattgactattatggcaagaaaggtattctcaaacgcgtagatgggtcgcaaggaatcgacaacgttgttgcagaagtcctgaagattattggttggagcgataag

SEQ ID NO: 206 - protein, 231 aa, synthetic construct
  REGION 1..231: note = Variant of adenylate kinase
MHHHHHHGGSGMMAYLVFLGPPGAGKGTQSKRIQEKTGIPHISTGDIFRDIVKKENDELGKKIKEIMEKGELVPDELVNEVVKRRLSEKDCEKGFILDGYPRTVAQAEFLDSFLESQNKQLTAAVLFKVPEDVVVQRLTSRLICPKCGRIYNMISLPPKEDELCDDCKVKLVQRDDDGEETVRHRLKVYLEKTQPVIDYYGKKGILKRVDGSQGIDNVVAEVLKIIGWSDK

SEQ ID NO: 207 - DNA, 693 bp, synthetic construct
  misc_feature 1..693: note = Variant of adenylate kinase
  source 1..693: mol_type = other DNA
atgcaccatcatcaccatcacgggggctccggcatgatggcatatctggtgttcttaggtccgccgggcgcgggaaaaggtacccaatcgaaacgcattcaggaaaagactggcatcacgcatattagcacgggcgatatcttccgtgacatcgtcaagaaagagaacgatgaactgggcaagaagattaaagaaatcatggagaaaggtgaactcgttccagatgaactggtgaatgaggtagtaaaacgccgcctgtcggagaaagactgcgaaaaaggctttattttggatggttatccgcgtaccgttgctcaagcggaattcctggacagttttcttgaatcccagaacaaacagttgacagccgccgtgctgttcaaagtccccgaagatgttgttgtgcaacgtttaacctctcgcctgatctgtccgaaatgcgggcgtatctacaatatgatttcactgccaccaaaagaagacgagctgtgtgacgattgcaaagtcaaattagtacagcgtgatgatgataaggaagaaacggttcgtcaccgcctgaaagtctaccttgagaagacccagccggtcattgactattatggcaagaaaggtattctcaaacgcgtagatgggtcgcaaggaatcgacaacgttgttgcagaagtcctgaagattattggttggagcgataag

SEQ ID NO: 208 - protein, 231 aa, synthetic construct
  REGION 1..231: note = Variant of adenylate kinase
MHHHHHHGGSGMMAYLVFLGPPGAGKGTQSKRIQEKTGITHISTGDIFRDIVKKENDELGKKIKEIMEKGELVPDELVNEVVKRRLSEKDCEKGFILDGYPRTVAQAEFLDSFLESQNKQLTAAVLFKVPEDVVVQRLTSRLICPKCGRIYNMISLPPKEDELCDDCKVKLVQRDDDKEETVRHRLKVYLEKTQPVIDYYGKKGILKRVDGSQGIDNVVAEVLKIIGWSDK

SEQ ID NO: 209 - DNA, 693 bp, synthetic construct
  misc_feature 1..693: note = Variant of adenylate kinase
  source 1..693: mol_type = other DNA
atgcaccatcatcaccatcacgggggctccggcatgatggcatatctggtgttcttaggtccgccgggcgcgggaaaaggtacccaatcgaaacgcattcaggaaaagactggcatcccacatattagcacgggcgatatcttccgtgacatcgtcaagatggagaacgatgaactgggcaagaagattaaagaaatcatggagaaaggtgaactcgttccagatgaactggtgaatgaggtagtaaaacgccgcctgtcggagaaagactgcgaaaaaggctttattttggatggttatccgcgtaccgttgctcaagcggaattcctggacagttttcttgaatcccagaacaaacagttgacagccgccgtgctgttcaaagtccccgaagatgttgttgtgcaacgtttaacctctcgcctgatctgtccgaaatgcgggcgtatctacaatatgatttcactgccaccaaaagaagacgagctgtgtgacgattgcaaagtcaaattagtacagcgtgatgatgataaggaagaaacggttcgtcaccgcctgaaagtctaccttgagaagacccagccggtcattgactattatggcaagaaaggtattctcaaacgcgtagatgggtcgcaaggaatcgacaacgttgttgcagaagtcctgaagattattggttggagcgataag

SEQ ID NO: 210 - protein, 231 aa, synthetic construct
  REGION 1..231: note = Variant of adenylate kinase
MHHHHHHGGSGMMAYLVFLGPPGAGKGTQSKRIQEKTGIPHISTGDIFRDIVKMENDELGKKIKEIMEKGELVPDELVNEVVKRRLSEKDCEKGFILDGYPRTVAQAEFLDSFLESQNKQLTAAVLFKVPEDVVVQRLTSRLICPKCGRIYNMISLPPKEDELCDDCKVKLVQRDDDKEETVRHRLKVYLEKTQPVIDYYGKKGILKRVDGSQGIDNVVAEVLKIIGWSDK

SEQ ID NO: 211 - DNA, 693 bp, synthetic construct
  misc_feature 1..693: note = Variant of adenylate kinase
  source 1..693: mol_type = other DNA
atgcaccatcatcaccatcacgggggctccggcatgatggcatatctggtgttcttaggtccgccgggcgcgggaaaaggtacccaatcgaaacgcattcaggaaaagactggcatcccacatattagcacgggcgatatcttccgtgacatcgtcaagaaagagaacgatgaactgggcaagaagattaaagaaatcatggagaaaggtgaactcgttccagatgaactggtgaatgaggtagtaaaacgccgcctgtcggagaaagactgcgaaaaaggctttattttggatggttatccgcgtaccgttgctcaagcggaattcctggagagttttcttgaatcccagaacaaacagttgacagccgccgtgctgttcaaagtccccgaagatgttgttgtgcaacgtttaacctctcgcctgatctgtccgaaatgcgggcgtatctacaacaagatttttctgccaccaaaagaagacgagctgtgtgacgattgcaaagtcaaattagtacagcgtgatgatgataaggaagaaacggttcgtcaccgcctgaaagtctaccttgagaagacccagccggtcattgactattatggcaagaaaggtattctcaaacgcgtagatgggtcgcaaggaatcgacaacgttgttgcagaagtcctgaagattattggttggagcgataag

SEQ ID NO: 212 - protein, 231 aa, synthetic construct
  REGION 1..231: note = Variant of adenylate kinase
MHHHHHHGGSGMMAYLVFLGPPGAGKGTQSKRIQEKTGIPHISTGDIFRDIVKKENDELGKKIKEIMEKGELVPDELVNEVVKRRLSEKDCEKGFILDGYPRTVAQAEFLESFLESQNKQLTAAVLFKVPEDVVVQRLTSRLICPKCGRIYNKIFLPPKEDELCDDCKVKLVQRDDDKEETVRHRLKVYLEKTQPVIDYYGKKGILKRVDGSQGIDNVVAEVLKIIGWSDK

SEQ ID NO: 213 - DNA, 693 bp, synthetic construct
  misc_feature 1..693: note = Variant of adenylate kinase
  source 1..693: mol_type = other DNA
atgcaccatcatcaccatcacgggggctccggcatgatggcatatctggtgttcttaggtccgccgggcgcgggaaaaggtacccaatcgaaacgcattcaggaaaagactggcatcccacatattagcacgggcgatatcttccgtgacatcgtcaagaaagagaacgatgaactgggcaagattattaaagaaatcatggagaaaggtgaactcgttccagatgaactggtgaatgaggtagtaaaacgccgcctgtcggagaaagactgcgaaaaaggctttattttggatggttatccgcgtaccgttgctcaagcggaattcctggacagttttcttgaatcccagaacaaacagttgacagccgccgtgctgttcaaagtccccgaagatgttgttgtgcaacgtttaacctctcgcctgatctgtccgaaatgcgggcgtatctacaatatgatttcactgccaccaaaagaagacgagctgtgtgacgattgcaaagtcaaattagtacagcgtgatgatgataaggaagaaacggttcgtcaccgcctgaaagtctaccttgagaagacccagccggtcattgactattatggcaagaaaggtattctcaaacgcgtagatgggtcgcaaggaatcgacaacgttgttgcagaagtcctgaagattattggttggagcgataag

SEQ ID NO: 214 - protein, 231 aa, synthetic construct
  REGION 1..231: note = Variant of adenylate kinase
MHHHHHHGGSGMMAYLVFLGPPGAGKGTQSKRIQEKTGIPHISTGDIFRDIVKKENDELGKIIKEIMEKGELVPDELVNEVVKRRLSEKDCEKGFILDGYPRTVAQAEFLDSFLESQNKQLTAAVLFKVPEDVVVQRLTSRLICPKCGRIYNMISLPPKEDELCDDCKVKLVQRDDDKEETVRHRLKVYLEKTQPVIDYYGKKGILKRVDGSQGIDNVVAEVLKIIGWSDK

SEQ ID NO: 215 - DNA, 693 bp, synthetic construct
  misc_feature 1..693: note = Variant of adenylate kinase
  source 1..693: mol_type = other DNA
atgcaccatcatcaccatcacgggggctccggcatgatggcatatctggtgttcttaggtccgccgggcgcgggaaaaggtacccaatcgaaacgcattcaggaaaagactggcatcccacatattagcacgggcgatatcttccgtgacatcgtcaagaaagagaacgatgaactgggcaagaagattaaagaaatcatggagaaaggtgaactcgttccagatgaactggtgaatggggtagtaaaacgccgcctgtcggagaaagactgcgaaaaaggctttattttggatggttatccgcgtaccgttgctcaagcggaattcctggacagttttcttgaatcccagaacaaacagttgacagccgccgtgctgttcaaagtccccgaagatgttgttgtgcaacgtttaacctctcgcctgatctgtccgaaatgcgggcgtatctacaatatgatttcactgccaccaaaagaagacgagctgtgtgacgattgcaaagtcaaattagtacagcgtgatgatgataaggaagaaacggttcgtcaccgcctgaaagtctaccttgagaagacccagccggtcattgactattatggcaagaaaggtattctcaaacgcgtagatgggtcgcaaggaatcgacaacgttgttgcagaagtcctgaagattattggttggagcgataag

SEQ ID NO: 216 - protein, 231 aa, synthetic construct
  REGION 1..231: note = Variant of adenylate kinase
MHHHHHHGGSGMMAYLVFLGPPGAGKGTQSKRIQEKTGIPHISTGDIFRDIVKKENDELGKKIKEIMEKGELVPDELVNGVVKRRLSEKDCEKGFILDGYPRTVAQAEFLDSFLESQNKQLTAAVLFKVPEDVVVQRLTSRLICPKCGRIYNMISLPPKEDELCDDCKVKLVQRDDDKEETVRHRLKVYLEKTQPVIDYYGKKGILKRVDGSQGIDNVVAEVLKIIGWSDK

SEQ ID NO: 217 - DNA, 693 bp, synthetic construct
  misc_feature 1..693: note = Variant of adenylate kinase
  source 1..693: mol_type = other DNA
atgcaccatcatcaccatcacgggggctccggcatgatggcatatctggtgttcttaggtccgccgggcgcgggaaaaggtacccaatcgaaacgcattcaggaaaagactggcatcccacatattagcacgggcgatatcttccgtgacatcgtcaagaaagagaacgatgaactgggcaagaagattaaagaaatcatggagaaaggtgaactcgttccagatgaactggtgaatgaggtagtaaaacgccgcctgtcggagaaagactgcgaaaaaggctttattttggatggttatccgcgtaccgttgctcaagcggaattcctggacatgtttcttgaatcccagaacaaacagttgacagccgccgtgctgttcaaagtccccgaagatgttgttgtgcaacgtttaacctctcgcctgatctgtccgaaatgcgggcgtatctacaatatgatttcactgccaccaaaagaagacgagctgtgtgacgattgcaaagtcaaattagtacagcgtgatgatgataaggaagaaacggttcgtcaccgcctgaaagtctaccttgagaagacccagccggtcattgactattatggcaagaaaggtattctcaaacgcgtagatgggtcgcaaggaatcgacaacgttgttgcagaagtcctgaagattattggttggagcgataag

SEQ ID NO: 218 - protein, 231 aa, synthetic construct
  REGION 1..231: note = Variant of adenylate kinase
MHHHHHHGGSGMMAYLVFLGPPGAGKGTQSKRIQEKTGIPHISTGDIFRDIVKKENDELGKKIKEIMEKGELVPDELVNEVVKRRLSEKDCEKGFILDGYPRTVAQAEFLDMFLESQNKQLTAAVLFKVPEDVVVQRLTSRLICPKCGRIYNMISLPPKEDELCDDCKVKLVQRDDDKEETVRHRLKVYLEKTQPVIDYYGKKGILKRVDGSQGIDNVVAEVLKIIGWSDK

SEQ ID NO: 219 - DNA, 693 bp, synthetic construct
  misc_feature 1..693: note = Variant of adenylate kinase
  source 1..693: mol_type = other DNA
atgcaccatcatcaccatcacgggggctccggcatgatggcatatctggtgttcttaggtccgccgggcgcgggaaaaggtacccaatcgaaacgcattcaggaaaagactggcatcccacatattagcacgggcgatatcttccgtgacatcgtcaagaaagagaacgatgaactgggcaagaagattaaagaaatcatggagaaaggtgaactcgttccagatgaactggtgaatgaggtagtaaaacgccgcctgtcggagaaagactgcgaaaaaggctttattttggatggttatccgcgtaccgttgctcaagcggaattcctggacagttttcttgaatcccagaacaaacagttgacagccgccgtgctgttcaaagtccccgaagatgttgttgtgcaacgtttaacctctcgcctgatctgtccgaaatgcgggcgtatctacaatatgatttcactgccaccaaaagaagacgagctgtgtgacgattgcaaagtcaaattagtacagcgttctgatgataaggaagaaacggttcgtcaccgcctgaaagtctaccttgagaagacccagccggtcattgactattatggcaagaaaggtattctcaaacgcgtagatgggtcgcaaggaatcgacaacgttgttgcagaagtcctgaagattattggttggagcgataag

SEQ ID NO: 220 - protein, 231 aa, synthetic construct
  REGION 1..231: note = Variant of adenylate kinase
MHHHHHHGGSGMMAYLVFLGPPGAGKGTQSKRIQEKTGIPHISTGDIFRDIVKKENDELGKKIKEIMEKGELVPDELVNEVVKRRLSEKDCEKGFILDGYPRTVAQAEFLDSFLESQNKQLTAAVLFKVPEDVVVQRLTSRLICPKCGRIYNMISLPPKEDELCDDCKVKLVQRSDDKEETVRHRLKVYLEKTQPVIDYYGKKGILKRVDGSQGIDNVVAEVLKIIGWSDK

SEQ ID NO: 221 - DNA, 693 bp, synthetic construct
  misc_feature 1..693: note = Variant of adenylate kinase
  source 1..693: mol_type = other DNA
atgcaccatcatcaccatcacgggggctccggcatgatggcatatctggtgttcttaggtccgccgggcgcgggaaaaggtacccaatcgaaacgcattcaggaaaagactggcatcccacatattagcacgggcgatatcttccgtgacatcgtcaagaaagagaacgatgaactgggcaagaagattaaagaaatcatggagaaaggtgaactcgtttctgatgaactggtgaatgaggtagtaaaacgccgcctgtcggagaaagactgcgaaaaaggctttattttggatggttatccgcgtaccgttgctcaagcggaattcctggacagttttcttgaatcccagaacaaacagttgacagccgccgtgctgttcaaagtccccgaagatgttgttgtgcaacgtttaacctctcgcctgatctgtccgaaatgcgggcgtatctacaatatgatttcactgccaccaaaagaagacgagctgtgtgacgattgcaaagtcaaattagtacagcgtgatgatgataaggaagaaacggttcgtcaccgcctgaaagtctaccttgagaagacccagccggtcattgactattatggcaagaaaggtattctcaaacgcgtagatgggtcgcaaggaatcgacaacgttgttgcagaagtcctgaagattattggttggagcgataag

SEQ ID NO: 222 - protein, 231 aa, synthetic construct
  REGION 1..231: note = Variant of adenylate kinase
MHHHHHHGGSGMMAYLVFLGPPGAGKGTQSKRIQEKTGIPHISTGDIFRDIVKKENDELGKKIKEIMEKGELVSDELVNEVVKRRLSEKDCEKGFILDGYPRTVAQAEFLDSFLESQNKQLTAAVLFKVPEDVVVQRLTSRLICPKCGRIYNMISLPPKEDELCDDCKVKLVQRDDDKEETVRHRLKVYLEKTQPVIDYYGKKGILKRVDGSQGIDNVVAEVLKIIGWSDK

SEQ ID NO: 223 - DNA, 693 bp, synthetic construct
  misc_feature 1..693: note = Variant of adenylate kinase
  source 1..693: mol_type = other DNA
atgcaccatcatcaccatcacgggggctccggcatgatggagtatctggtgttcttaggtccgccgggcgcgggaaaaggtacccaatcgaaacgcattcaggaaaagactggcatcccacatattagcacgggcgatatcttccgtgacatcgtcaagaaagagaacgatgaactgggcaagaagattaaagaaatcatggagaaaggtgaactcgttccagatgaactggtgaatgaggtagtaaaacgccgcctgtcggagaaagactgcgaaaaaggctttattttggatggttatccgcgtaccgttgctcaagcggaattcctggacagttttcttgaatcccagaacaaacagttgacagccgccgtgctgttcaaagtccccgaagatgttgttgtgcaacgtttaacctctcgcctgatctgtccgaaatgcgggcgtatctacaatatgatttcactgccaccaaaagaagacgagctgtgtgacgattgcaaagtcaaattagtacagcgtgatgatgataaggaagaaacggttcgtcaccgcctgaaagtctaccttgagaagacccagccggtcattgactattatggcaagaaaggtattctcaaacgcgtagatgggtcgcaaggaatcgacaacgttgttgcagaagtcctgaagattattggttggagcgataag

SEQ ID NO: 224 - protein, 231 aa, synthetic construct
  REGION 1..231: note = Variant of adenylate kinase
MHHHHHHGGSGMMEYLVFLGPPGAGKGTQSKRIQEKTGIPHISTGDIFRDIVKKENDELGKKIKEIMEKGELVPDELVNEVVKRRLSEKDCEKGFILDGYPRTVAQAEFLDSFLESQNKQLTAAVLFKVPEDVVVQRLTSRLICPKCGRIYNMISLPPKEDELCDDCKVKLVQRDDDKEETVRHRLKVYLEKTQPVIDYYGKKGILKRVDGSQGIDNVVAEVLKIIGWSDK

SEQ ID NO: 225 - DNA, 693 bp, synthetic construct
  misc_feature 1..693: note = Variant of adenylate kinase
  source 1..693: mol_type = other DNA
atgcaccatcatcaccatcacgggggctccggcatgatggcatatctggtgttcttaggtccgccgggcgcgggaaaaggtacccaatcgaaacgcattcaggaaaagactggcatcccacatattagcacgggcgatatcttccgtgacatcgtcaagaaagagaacttggaactgggcaagaagattaaagaaatcatggagaaaggtgaactcgttccagatgaactggtgaatgaggtagtaaaacgccgcctgtcggagaaagactgcgaaaaaggctttattttggatggttatccgcgtaccgttgctcaagcggaattcctggacagttttcttgaatcccagaacaaacagttgacagccgccgtgctgttcaaagtccccgaagatgttgttgtgcaacgtttaacctctcgcctgatctgtccgaaatgcgggcgtatctacaatatgatttcactgccaccaaaagaagacgagctgtgtgacgattgcaaagtcaaattagtacagcgtgatgatgataaggaagaaacggttcgtcaccgcctgaaagtctaccttgagaagacccagccggtcattgactattatggcaagaaaggtattctcaaacgcgtagatgggtcgcaaggaatcgacaacgttgttgcagaagtcctgaagattattggttggagcgataag

SEQ ID NO: 226 - protein, 231 aa, synthetic construct
  REGION 1..231: note = Variant of adenylate kinase
MHHHHHHGGSGMMAYLVFLGPPGAGKGTQSKRIQEKTGIPHISTGDIFRDIVKKENLELGKKIKEIMEKGELVPDELVNEVVKRRLSEKDCEKGFILDGYPRTVAQAEFLDSFLESQNKQLTAAVLFKVPEDVVVQRLTSRLICPKCGRIYNMISLPPKEDELCDDCKVKLVQRDDDKEETVRHRLKVYLEKTQPVIDYYGKKGILKRVDGSQGIDNVVAEVLKIIGWSDK

SEQ ID NO: 227 - DNA, 693 bp, synthetic construct
  misc_feature 1..693: note = Variant of adenylate kinase
  source 1..693: mol_type = other DNA
atgcaccatcatcaccatcacgggggctccggcatgatggcatatctggtgttcttaggtccgccgggcgcgggaaaaggtacccaatcgaaacgcattcaggaaaagactggcatcccacatattagcacgggcgatatcttccgtgacggggtcaagaaagagaacgatgaactgggcaagaagattaaagaaatcatggagaaaggtgaactcgttccagatgaactggtgaatgaggtagtaaaacgccgcctgtcggagaaagactgcgaaaaaggctttattttggatggttatccgcgtaccgttgctcaagcggaattcctggacagttttcttgaatcccagaacaaacagttgacagccgccgtgctgttcaaagtccccgaagatgttgttgtgcaacgtttaacctctcgcctgatctgtccgaaatgcgggcgtatctacaatatgatttcactgccaccaaaagaagacgagctgtgtgacgattgcaaagtcaaattagtacagcgtgatgatgataaggaagaaacggttcgtcaccgcctgaaagtctaccttgagaagacccagccggtcattgactattatggcaagaaaggtattctcaaacgcgtagatgggtcgcaaggaatcgacaacgttgttgcagaagtcctgaagattattggttggagcgataag

SEQ ID NO: 228 - protein, 231 aa, synthetic construct
  REGION 1..231: note = Variant of adenylate kinase
MHHHHHHGGSGMMAYLVFLGPPGAGKGTQSKRIQEKTGIPHISTGDIFRDGVKKENDELGKKIKEIMEKGELVPDELVNEVVKRRLSEKDCEKGFILDGYPRTVAQAEFLDSFLESQNKQLTAAVLFKVPEDVVVQRLTSRLICPKCGRIYNMISLPPKEDELCDDCKVKLVQRDDDKEETVRHRLKVYLEKTQPVIDYYGKKGILKRVDGSQGIDNVVAEVLKIIGWSDK

SEQ ID NO: 229 - DNA, 693 bp, synthetic construct
  misc_feature 1..693: note = Variant of adenylate kinase
  source 1..693: mol_type = other DNA
atgcaccatcatcaccatcacgggggctccggcatgatggcatatctggtgttcttaggtccgccgggcgcgggaaaaggtacccaatcgaaacgcattcaggaaaagactggcatcccacatattagcacgggcgatatcttccgtgacatcgtcaagaaagagaacgatgaactgggcaagaagattaaagaaatcatggagaaaggtgaactcgttccagatgaactggtgaatgaggtagtaaaacgccgcctgtcggagaaagactgcgaaaaattttttattttggatggttatccgcgtaccgttgctcaagcggaattcctggacagttttcttgaatcccagaacaaacagttgacagccgccgtgctgttcaaagtccccgaagatgttgttgtgcaacgtttaacctctcgcctgatctgtccgaaatgcgggcgtatctacaatatgatttcactgccaccaaaagaagacgagctgtgtgacgattgcaaagtcaaattagtacagcgtgatgatgataaggaagaaacggttcgtcaccgcctgaaagtctaccttgagaagacccagccggtcattgactattatggcaagaaaggtattctcaaacgcgtagatgggtcgcaaggaatcgacaacgttgttgcagaagtcctgaagattattggttggagcgataag

SEQ ID NO: 230 - protein, 231 aa, synthetic construct
  REGION 1..231: note = Variant of adenylate kinase
MHHHHHHGGSGMMAYLVFLGPPGAGKGTQSKRIQEKTGIPHISTGDIFRDIVKKENDELGKKIKEIMEKGELVPDELVNEVVKRRLSEKDCEKFFILDGYPRTVAQAEFLDSFLESQNKQLTAAVLFKVPEDVVVQRLTSRLICPKCGRIYNMISLPPKEDELCDDCKVKLVQRDDDKEETVRHRLKVYLEKTQPVIDYYGKKGILKRVDGSQGIDNVVAEVLKIIGWSDK

SEQ ID NO: 231 - DNA, 693 bp, synthetic construct
  misc_feature 1..693: note = Variant of adenylate kinase
  source 1..693: mol_type = other DNA
atgcaccatcatcaccatcacgggggctccggcatgatggcatatctggtgttcttaggtccgccgggcgcgggaaaaggtacccaatcgaaacgcattcaggaaaagactggcatcccacatattagcacgggcgatatcttccgtgacatcgtcaagaaagagaacgatgaactgggcaagaagattaaagaaatcatggctaaaggtgaactcgttccagatgaactggtgaatgaggtagtaaaacgccgcctgtcggagaaagactgcgaaaaaggctttattttggatggttatccgcgtaccgttgctcaagcggaattcctggacagttttcttgaatcccagaacaaacagttgacagccgccgtgctgttcaaagtccccgaagatgttgttgtgcaacgtttaacctctcgcctgatctgtccgaaatgcgggcgtatctacaatatgatttcactgccaccaaaagaagacgagctgtgtgacgattgcaaagtcaaattagtacagcgtgatgatgataaggaagaaacggttcgtcaccgcctgaaagtctaccttgagaagacccagccggtcattgactattatggcaagaaaggtattctcaaacgcgtagatgggtcgcaaggaatcgacaacgttgttgcagaagtcctgaagattattggttggagcgataag

SEQ ID NO: 232 - protein, 231 aa, synthetic construct
  REGION 1..231: note = Variant of adenylate kinase
MHHHHHHGGSGMMAYLVFLGPPGAGKGTQSKRIQEKTGIPHISTGDIFRDIVKKENDELGKKIKEIMAKGELVPDELVNEVVKRRLSEKDCEKGFILDGYPRTVAQAEFLDSFLESQNKQLTAAVLFKVPEDVVVQRLTSRLICPKCGRIYNMISLPPKEDELCDDCKVKLVQRDDDKEETVRHRLKVYLEKTQPVIDYYGKKGILKRVDGSQGIDNVVAEVLKIIGWSDK

SEQ ID NO: 233 - DNA, 693 bp, synthetic construct
  misc_feature 1..693: note = Variant of adenylate kinase
  source 1..693: mol_type = other DNA
atgcaccatcatcaccatcacgggggctccggcatgatggcatatctggtgttcttaggtccgccgggcgcgggaaaaggtacccaatcgaaacgcattcaggaaaagactggcatcccacatattagcacgggcgatatcttccgtgacatcgtcaagaaagagaacgatgaactgggcaagaagattaaagaaatcatggagaaaggtgaactcgttccagatgaactggtgaatgaggtagtaaaacgccgcctgtcggagaaagactgcgaaaaaggctttattttggatggttatccgcgtaccgttcggcaagcggaattcctggacagttttcttgaatcccagaacaaacagttgacagccgccgtgctgttcaaagtccccgaagatgttgttgtgcaacgtttaacctctcgcctgatctgtccgaaatgcgggcgtatctacaatatgatttcactgccaccaaaagaagacgagctgtgtgacgattgcaaagtcaaattagtacagcgtgatgatgataaggaagaaacggttcgtcaccgcctgaaagtctaccttgagaagacccagccggtcattgactattatggcaagaaaggtattctcaaacgcgtagatgggtcgcaaggaatcgacaacgttgttgcagaagtcctgaagattattggttggagcgataag

SEQ ID NO: 234 - protein, 231 aa, synthetic construct
  REGION 1..231: note = Variant of adenylate kinase
MHHHHHHGGSGMMAYLVFLGPPGAGKGTQSKRIQEKTGIPHISTGDIFRDIVKKENDELGKKIKEIMEKGELVPDELVNEVVKRRLSEKDCEKGFILDGYPRTVRQAEFLDSFLESQNKQLTAAVLFKVPEDVVVQRLTSRLICPKCGRIYNMISLPPKEDELCDDCKVKLVQRDDDKEETVRHRLKVYLEKTQPVIDYYGKKGILKRVDGSQGIDNVVAEVLKIIGWSDK

SEQ ID NO: 235 - DNA, 693 bp, synthetic construct
  misc_feature 1..693: note = Variant of adenylate kinase
  source 1..693: mol_type = other DNA
atgcaccatcatcaccatcacgggggctccggcatgatggcatatctggtgttcttaggtccgccgggcgcgggaaaaggtacccaatcgaaacgcattcaggaaaagactggcatcccacatattagcacgggcgatatcttccgtgacatcgtcaagaaagagaacgatgaactgggcaagaagattaaagaaatcatggagaaaggtgaactcgttccagatgaactggtgaatgaggtagtaaaacgccgcctgtcggagaaagactgcgaaaaaggctttattttggatggttatccgcgtaccgttgctcaagcggaattcctggacagttttcttgaatcccagaacaaacagttgacagccgccgtgctgttcaaagtccccgaagatgttgttgtgcaacgtttaacctctcgcctgatctgtccgaaatgcgggcgtatctacaatatgatttcactgccaccaaaagaagacgagctgtgtgacgattgcaaagtcgcgttagtacagcgtgatgatgataaggaagaaacggttcgtcaccgcctgaaagtctaccttgagaagacccagccggtcattgactattatggcaagaaaggtattctcaaacgcgtagatgggtcgcaaggaatcgacaacgttgttgcagaagtcctgaagattattggttggagcgataag

SEQ ID NO: 236 - protein, 231 aa, synthetic construct
  REGION 1..231: note = Variant of adenylate kinase
MHHHHHHGGSGMMAYLVFLGPPGAGKGTQSKRIQEKTGIPHISTGDIFRDIVKKENDELGKKIKEIMEKGELVPDELVNEVVKRRLSEKDCEKGFILDGYPRTVAQAEFLDSFLESQNKQLTAAVLFKVPEDVVVQRLTSRLICPKCGRIYNMISLPPKEDELCDDCKVALVQRDDDKEETVRHRLKVYLEKTQPVIDYYGKKGILKRVDGSQGIDNVVAEVLKIIGWSDK

SEQ ID NO: 237 - DNA, 693 bp, synthetic construct
  misc_feature 1..693: note = Variant of adenylate kinase
  source 1..693: mol_type = other DNA
atgcaccatcatcaccatcacgggggctccggcatgatggcatatctggtgttcttaggtccgccgggcgcgggaaaaggtacccaatcgaaacgcattcaggaaaagactggcatcccacatattagcacgggcgatatcttccgtgacatcgtcaagaaagagaacgatgaactgggcaagaagattaaagaaatcatggagaaaggtgaactcgttccagatgaactggtgaatgaggtagtaaaacgccgcctgtcggagaaagactgcgaaaaaggctttattttggatggttatccgcgtaccgttgctcaagcggaattcctggacagttttcttgaatccaataacaaacagttgacagccgccgtgctgttcaaagtccccgaagatgttgttgtgcaacgtttaacctctcgcctgatctgtccgaaatgcgggcgtatctacaatatgatttcactgccaccaaaagaagacgagctgtgtgacgattgcaaagtcaaattagtacagcgtgatgatgataaggaagaaacggttcgtcaccgcctgaaagtctaccttgagaagacccagccggtcattgactattatggcaagaaaggtattctcaaacgcgtagatgggtcgcaaggaatcgacaacgttgttgcagaagtcctgaagattattggttggagcgataag

SEQ ID NO: 238 - protein, 231 aa, synthetic construct
  REGION 1..231: note = Variant of adenylate kinase
MHHHHHHGGSGMMAYLVFLGPPGAGKGTQSKRIQEKTGIPHISTGDIFRDIVKKENDELGKKIKEIMEKGELVPDELVNEVVKRRLSEKDCEKGFILDGYPRTVAQAEFLDSFLESNNKQLTAAVLFKVPEDVVVQRLTSRLICPKCGRIYNMISLPPKEDELCDDCKVKLVQRDDDKEETVRHRLKVYLEKTQPVIDYYGKKGILKRVDGSQGIDNVVAEVLKIIGWSDK

SEQ ID NO: 239 - DNA, 693 bp, synthetic construct
  misc_feature 1..693: note = Variant of adenylate kinase
  source 1..693: mol_type = other DNA
atgcaccatcatcaccatcacgggggctccggcatgatggcatatctggtgttcttaggtccgccgggcgcgggaaaaggtacccaatcgaaacgcattcaggaaaagactggcatcccacatattagcacgggcgatatcttccgtgacatcgtcaagaaagagaacgatgaactgggcaagaagattaaagaaatcatggagaaaggtgaactcgttccagatgaactggtgaatgaggtagtaaaacgccgcctgtcggagaaagactgcgaaaaaggctttattttggatggttatccgcgtaccgttgctcaagcggaattcctggacagttttcttgaatcccagaacaaacagttgacagccgccgtgctgttctcggtccccgaagatgttgttgtgcaacgtttaacctctcgcctgatctgtccgaaatgcgggcgtatctacaatatgatttcactgccaccaaaagaagacgagctgtgtgacgattgcaaagtcaaattagtacagcgtgatgatgataaggaagaaacggttcgtcaccgcctgaaagtctaccttgagaagacccagccggtcattgactattatggcaagaaaggtattctcaaacgcgtagatgggtcgcaaggaatcgacaacgttgttgcagaagtcctgaagattattggttggagcgataag

SEQ ID NO: 240 - protein, 231 aa, synthetic construct
  REGION 1..231: note = Variant of adenylate kinase
MHHHHHHGGSGMMAYLVFLGPPGAGKGTQSKRIQEKTGIPHISTGDIFRDIVKKENDELGKKIKEIMEKGELVPDELVNEVVKRRLSEKDCEKGFILDGYPRTVAQAEFLDSFLESQNKQLTAAVLFSVPEDVVVQRLTSRLICPKCGRIYNMISLPPKEDELCDDCKVKLVQRDDDKEETVRHRLKVYLEKTQPVIDYYGKKGILKRVDGSQGIDNVVAEVLKIIGWSDK

SEQ ID NO: 241 - DNA, 693 bp, synthetic construct
  misc_feature 1..693: note = Variant of adenylate kinase
  source 1..693: mol_type = other DNA
atgcaccatcatcaccatcacgggggctccggcatgatggcatatctggtgttcttaggtccgccgggcgcgggaaaaggtacccaatcgaaacgcattcaggaaaagactggcatctttcatattagcacgggcgatatcttccgtgacatcgtcaagaaagagaacgatgaactgggcaagaagattaaagaaatcatggagaaaggtgaactcgttccagatgaactggtgaatgaggtagtaaaacgccgcctgtcggagaaagactgcgaaaaaggctttattttggatggttatccgcgtaccgttgctcaagcggaattcctggacagttttcttgaatcccagaacaaacagttgacagccgccgtgctgttcaaagtccccgaagatgttgttgtgcaacgtttaacctctcgcctgatctgtccgaaatgcgggcgtatctacaatatgatttcactgccaccaaaagaagacgagctgtgtgacgattgcaaagtcaaattagtacagcgtgatgatgataaggaagaaacggttcgtcaccgcctgaaagtctaccttgagaagacccagccggtcattgactattatggcaagaaaggtattctcaaacgcgtagatgggtcgcaaggaatcgacaacgttgttgcagaagtcctgaagattattggttggagcgataag

SEQ ID NO: 242 - protein, 231 aa, synthetic construct
  REGION 1..231: note = Variant of adenylate kinase
MHHHHHHGGSGMMAYLVFLGPPGAGKGTQSKRIQEKTGIFHISTGDIFRDIVKKENDELGKKIKEIMEKGELVPDELVNEVVKRRLSEKDCEKGFILDGYPRTVAQAEFLDSFLESQNKQLTAAVLFKVPEDVVVQRLTSRLICPKCGRIYNMISLPPKEDELCDDCKVKLVQRDDDKEETVRHRLKVYLEKTQPVIDYYGKKGILKRVDGSQGIDNVVAEVLKIIGWSDK

SEQ ID NO: 243 - DNA, 693 bp, synthetic construct
  misc_feature 1..693: note = Variant of adenylate kinase
  source 1..693: mol_type = other DNA
atgcaccatcatcaccatcacgggggctccggcatgatggcatatctggtgttcttaggtccgccgggcgcgggaaaaggtacccaatcgaaacgcattcaggaaaagactggcatcccacatattagcacgggcgatatcttccgtgacatcgtcaagaaagagaacgatgaactgggcaagaagattaaagaaatcatggagaaaggtgaactcgttccagatgaactggtgaatgaggtagtaaaacgccgcctgtcggagaaagactgcgaaaaaggctttattttggatggttatccgcgtaccgttgctcaagcggaattcctggactgttttcttgaatcccagaacaaacagttgacagccgccgtgctgttcaaagtccccgaagatgttgttgtgcaacgtttaacctctcgcctgatctgtccgaaatgcgggcgtatctacaatatgatttcactgccaccaaaagaagacgagctgtgtgacgattgcaaagtcaaattagtacagcgtgatgatgataaggaagaaacggttcgtcaccgcctgaaagtctaccttgagaagacccagccggtcattgactattatggcaagaaaggtattctcaaacgcgtagatgggtcgcaaggaatcgacaacgttgttgcagaagtcctgaagattattggttggagcgataag

SEQ ID NO: 244 - protein, 231 aa, synthetic construct
  REGION 1..231: note = Variant of adenylate kinase
MHHHHHHGGSGMMAYLVFLGPPGAGKGTQSKRIQEKTGIPHISTGDIFRDIVKKENDELGKKIKEIMEKGELVPDELVNEVVKRRLSEKDCEKGFILDGYPRTVAQAEFLDCFLESQNKQLTAAVLFKVPEDVVVQRLTSRLICPKCGRIYNMISLPPKEDELCDDCKVKLVQRDDDKEETVRHRLKVYLEKTQPVIDYYGKKGILKRVDGSQGIDNVVAEVLKIIGWSDK

SEQ ID NO: 245 - DNA, 693 bp, synthetic construct
  misc_feature 1..693: note = Variant of adenylate kinase
  source 1..693: mol_type = other DNA
atgcaccatcatcaccatcacgggggctccggcatgatggcatatctggtgttcttaggtccgccgggcgcgggaaaaggtacccaatcgaaacgcattcaggaaaagactggcatcccacatattagcacgggcgatatcttccgtgacatcgtcaagaaagagaacgatgaactgggcaagaagattaaagaaatcatggagaaaggtgaactcgttccagatgaactggtgaatgaggtagtaaaacgccgcctgtcggagaaagactgcgaaaaagcttttattttggatggttatccgcgtaccgttgctcaagcggaattcctggacagttttcttgaatcccagaacaaacagttgacagccgccgtgctgttcaaagtccccgaagatgttgttgtgcaacgtttaacctctcgcctgatctgtccgaaatgcgggcgtatctacaatatgatttcactgccaccaaaagaagacgagctgtgtgacgattgcaaagtcaaattagtacagcgtgatgatgataaggaagaaacggttcgtcaccgcctgaaagtctaccttgagaagacccagccggtcattgactattatggcaagaaaggtattctcaaacgcgtagatgggtcgcaaggaatcgacaacgttgttgcagaagtcctgaagattattggttggagcgataag

SEQ ID NO: 246 - protein, 231 aa, synthetic construct
  REGION 1..231: note = Variant of adenylate kinase
MHHHHHHGGSGMMAYLVFLGPPGAGKGTQSKRIQEKTGIPHISTGDIFRDIVKKENDELGKKIKEIMEKGELVPDELVNEVVKRRLSEKDCEKAFILDGYPRTVAQAEFLDSFLESQNKQLTAAVLFKVPEDVVVQRLTSRLICPKCGRIYNMISLPPKEDELCDDCKVKLVQRDDDKEETVRHRLKVYLEKTQPVIDYYGKKGILKRVDGSQGIDNVVAEVLKIIGWSDK

SEQ ID NO: 247 - DNA, 693 bp, synthetic construct
  misc_feature 1..693: note = Variant of adenylate kinase
  source 1..693: mol_type = other DNA
atgcaccatcatcaccatcacgggggctccggcatgatggcatatctggtgttcttaggtccgccgggcgcgggaaaaggtacccaatcgaaacgcattcaggaaaagactggcatcccacatattagcacgggcgatatcttccgtgacatcgtcaagaaagagaacgatgaactgggcgctaagattaaagaaatcatggagaaaggtgaactcgttccagatgaactggtgaatgaggtagtaaaacgccgcctgtcggagaaagactgcgaaaaaggctttattttggatggttatccgcgtaccgttgctcaagcggaattcctggacagttttcttgaatcccagaacaaacagttgacagccgccgtgctgttcaaagtccccgaagatgttgttgtgcaacgtttaacctctcgcctgatctgtccgaaatgcgggcgtatctacaatatgatttcactgccaccaaaagaagacgagctgtgtgacgattgcaaagtcaaattagtacagcgtgatgatgataaggaagaaacggttcgtcaccgcctgaaagtctaccttgagaagacccagccggtcattgactattatggcaagaaaggtattctcaaacgcgtagatgggtcgcaaggaatcgacaacgttgttgcagaagtcctgaagattattggttggagcgataag

SEQ ID NO: 248 - protein, 231 aa, synthetic construct
  REGION 1..231: note = Variant of adenylate kinase
MHHHHHHGGSGMMAYLVFLGPPGAGKGTQSKRIQEKTGIPHISTGDIFRDIVKKENDELGAKIKEIMEKGELVPDELVNEVVKRRLSEKDCEKGFILDGYPRTVAQAEFLDSFLESQNKQLTAAVLFKVPEDVVVQRLTSRLICPKCGRIYNMISLPPKEDELCDDCKVKLVQRDDDKEETVRHRLKVYLEKTQPVIDYYGKKGILKRVDGSQGIDNVVAEVLKIIGWSDK

SEQ ID NO: 249 - DNA, 693 bp, synthetic construct
  misc_feature 1..693: note = Variant of adenylate kinase
  source 1..693: mol_type = other DNA
atgcaccatcatcaccatcacgggggctccggcatgatggcatatctggtgttcttaggtccgccgggcgcgggaaaaggtacccaatcgaaacgcattcaggaaaagactggcatcccacatattagcacgggcgatatcttccgtgacatcgtcaagaaagagaacgatgaactgggcaagaagattaaagaaatcatgtggaaaggtgaactcgttccagatgaactggtgaatgaggtagtaaaacgccgcctgtcggagaaagactgcgaaaaaggctttattttggatggttatccgcgtaccgttgctcaagcggaattcctggacagttttcttgaatcccagaacaaacagttgacagccgccgtgctgttcaaagtccccgaagatgttgttgtgcaacgtttaacctctcgcctgatctgtccgaaatgcgggcgtatctacaatatgatttcactgccaccaaaagaagacgagctgtgtgacgattgcaaagtcaaattagtacagcgtgatgatgataaggaagaaacggttcgtcaccgcctgaaagtctaccttgagaagacccagccggtcattgactattatggcaagaaaggtattctcaaacgcgtagatgggtcgcaaggaatcgacaacgttgttgcagaagtcctgaagattattggttggagcgataag

SEQ ID NO: 250 - protein, 231 aa, synthetic construct
  REGION 1..231: note = Variant of adenylate kinase
MHHHHHHGGSGMMAYLVFLGPPGAGKGTQSKRIQEKTGIPHISTGDIFRDIVKKENDELGKKIKEIMWKGELVPDELVNEVVKRRLSEKDCEKGFILDGYPRTVAQAEFLDSFLESQNKQLTAAVLFKVPEDVVVQRLTSRLICPKCGRIYNMISLPPKEDELCDDCKVKLVQRDDDKEETVRHRLKVYLEKTQPVIDYYGKKGILKRVDGSQGIDNVVAEVLKIIGWSDK

SEQ ID NO: 251 - DNA, 693 bp, synthetic construct
  misc_feature 1..693: note = Variant of adenylate kinase
  source 1..693: mol_type = other DNA
atgcaccatcatcaccatcacgggggctccggcatgatggcatatctggtgttcttaggtccgccgggcgcgggaaaaggtacccaatcgaaacgcattcaggaaaagactggcatcccacatattagcacgggcgatatcttccgtgacatcgtcaagaaagagaacgatgaactgggcaagaagattaaagaaatcatggagaaaggtgaactcgttccagatgaactggtgaatgaggtagtaaaacgccgcctgtcggagaaagactgcgaaaaaggctttattttggatggttatccgcgtaccgttgctcaagcggaattcctggacagttttcttgaatcccagaacaaacagttgacagccgccgtgctgttcaaagtccccgaagatgttgttgtgcaacgtttaacctctcgcctgatctgtccgaaatgcgggcgtatctacaatatgatttcactgccaccaaaagaagacgagctgtgtgacgattgcaaagtcaaattagtacagcgtgatgatgataaggaagaaacggttcgtcaccgcctgaaagtctaccttgagaagacccagccggtcattgactattatggcggtaaaggtattctcaaacgcgtagatgggtcgcaaggaatcgacaacgttgttgcagaagtcctgaagattattggttggagcgataag

SEQ ID NO: 252 - protein, 231 aa, synthetic construct
  REGION 1..231: note = Variant of adenylate kinase
MHHHHHHGGSGMMAYLVFLGPPGAGKGTQSKRIQEKTGIPHISTGDIFRDIVKKENDELGKKIKEIMEKGELVPDELVNEVVKRRLSEKDCEKGFILDGYPRTVAQAEFLDSFLESQNKQLTAAVLFKVPEDVVVQRLTSRLICPKCGRIYNMISLPPKEDELCDDCKVKLVQRDDDKEETVRHRLKVYLEKTQPVIDYYGGKGILKRVDGSQGIDNVVAEVLKIIGWSDK

SEQ ID NO: 253 - DNA, 693 bp, synthetic construct
  misc_feature 1..693: note = Variant of adenylate kinase
  source 1..693: mol_type = other DNA
atgcaccatcatcaccatcacgggggctccggcatgatggcatatctggtgttcttaggtccgccgggcgcgggaaaaggtacccaatcgaaacgcattcaggaaaagactggcatcccacatattagcacgggcgatatcttccgtgacatcgtcaagaaagagaacgatgaactgggcaagaagattaaagaaatcatggagaaaggtgaactcgttccagatgaactggtgaatgaggtagtaaaacgccgcctgtcggagaaagactgcgaaaaaggctttattttggatggttatccgcgtaccgttgctcaagcggaattcctggacagttttcttgaatcccagaacaaacagttgacagccgccgtgctgttcaaagtccccgaagatgttgttgtgcaacgtttaacctctcgcctgatctgtccgaaatgcgggcgtatctacaatatgatttcactgccaccaaaagaagacgagctgtgtgacgattgcaaagtcaaattagtacagcgtgatgatgataaggaacctacggttcgtcaccgcctgaaagtctaccttgagaagacccagccggtcattgactattatggcaagaaaggtattctcaaacgcgtagatgggtcgcaaggaatcgacaacgttgttgcagaagtcctgaagattattggttggagcgataag

SEQ ID NO: 254 - protein, 231 aa, synthetic construct
  REGION 1..231: note = Variant of adenylate kinase
MHHHHHHGGSGMMAYLVFLGPPGAGKGTQSKRIQEKTGIPHISTGDIFRDIVKKENDELGKKIKEIMEKGELVPDELVNEVVKRRLSEKDCEKGFILDGYPRTVAQAEFLDSFLESQNKQLTAAVLFKVPEDVVVQRLTSRLICPKCGRIYNMISLPPKEDELCDDCKVKLVQRDDDKEPTVRHRLKVYLEKTQPVIDYYGKKGILKRVDGSQGIDNVVAEVLKIIGWSDK

SEQ ID NO: 255 - DNA, 693 bp, synthetic construct
  misc_feature 1..693: note = Variant of adenylate kinase
  source 1..693: mol_type = other DNA
atgcaccatcatcaccatcacgggggctccggcatgatggcatatctggtgttcttaggtccgccgggcgcgggaaaaggtacccaatcgaaacgcattcaggaaaagactggcatcccacatattagcacgggcgatatcttccgtgacatcgtcaagaaagagaacgatgaactgggcaagaagattaaagaaatcatggagaaaggtgaactcgttccagatgaactggtgaatgaggtagtaaaacgccgcctgtcggagaaagactgcgaaaaaggctttattttggatggttatccgcgtaccgttgctcaagcggaattcctggacagttttcttgaatcccagaaccgtcagttgacagccgccgtgctgttcaaagtccccgaagatgttgttgtgcaacgtttaacctctcgcctgatctgtccgaaatgcgggcgtatctacaatatgatttcactgccaccaaaagaagacgagctgtgtgacgattgcaaagtcaaattagtacagcgtgatgatgataaggaagaaacggttcgtcaccgcctgaaagtctaccttgagaagacccagccggtcattgactattatggcaagaaaggtattctcaaacgcgtagatgggtcgcaaggaatcgacaacgttgttgcagaagtcctgaagattattggttggagcgataag

SEQ ID NO: 256 - protein, 231 aa, synthetic construct
  REGION 1..231: note = Variant of adenylate kinase
MHHHHHHGGSGMMAYLVFLGPPGAGKGTQSKRIQEKTGIPHISTGDIFRDIVKKENDELGKKIKEIMEKGELVPDELVNEVVKRRLSEKDCEKGFILDGYPRTVAQAEFLDSFLESQNRQLTAAVLFKVPEDVVVQRLTSRLICPKCGRIYNMISLPPKEDELCDDCKVKLVQRDDDKEETVRHRLKVYLEKTQPVIDYYGKKGILKRVDGSQGIDNVVAEVLKIIGWSDK

SEQ ID NO: 257 - DNA, 693 bp, synthetic construct
  misc_feature 1..693: note = Variant of adenylate kinase
  source 1..693: mol_type = other DNA
atgcaccatcatcaccatcacgggggctccggcatgatggcatatctggtgttcttaggtccgccgggcgcgggaaaaggtacccaatcgaaacgcattcaggaaaagactggcatcccacatattagcacgggcgatatcttccgtgacatcgtcaagaaagagaacgatgaactgggcaagaagattaaagaaggtatggagaaaggtgaactcgttccagatgaactggtgaatgaggtagtaaaacgccgcctgtcggagaaagactgcgaaaaaggctttattttggatggttatccgcgtaccgttgctcaagcggaattcctggacagttttcttgaatcccagaacaaacagttgacagccgccgtgctgttcaaagtccccgaagatgttgttgtgcaacgtttaacctctcgcctgatctgtccgaaatgcgggcgtatctacaatatgatttcactgccaccaaaagaagacgagctgtgtgacgattgcaaagtcaaattagtacagcgtgatgatgataaggaagaaacggttcgtcaccgcctgaaagtctaccttgagaagacccagccggtcattgactattatggcaagaaaggtattctcaaacgcgtagatgggtcgcaaggaatcgacaacgttgttgcagaagtcctgaagattattggttggagcgataag

SEQ ID NO: 258 - protein, 231 aa, synthetic construct
  REGION 1..231: note = Variant of adenylate kinase
MHHHHHHGGSGMMAYLVFLGPPGAGKGTQSKRIQEKTGIPHISTGDIFRDIVKKENDELGKKIKEGMEKGELVPDELVNEVVKRRLSEKDCEKGFILDGYPRTVAQAEFLDSFLESQNKQLTAAVLFKVPEDVVVQRLTSRLICPKCGRIYNMISLPPKEDELCDDCKVKLVQRDDDKEETVRHRLKVYLEKTQPVIDYYGKKGILKRVDGSQGIDNVVAEVLKIIGWSDK

SEQ ID NO: 259 - DNA, 693 bp, synthetic construct
  misc_feature 1..693: note = Variant of adenylate kinase
  source 1..693: mol_type = other DNA
atgcaccatcatcaccatcacgggggctccggcatgatggcatatctggtgttcttaggtccgccgggcgcgggaaaaggtacccaatcgaaacgcattcaggaaaagactggcatcccacatattagcacgggcgatatcttccgtgacatcgtcaagaaagagaacgatgaactgggcaagaagattaaagaaatcatggagaaaggtgaactcgttccagatgaactggtgaatgaggtagtaaaacgccgcctgtcggagaaagactgcgaaaaaggctttattttggatggttatccgcgtaccgttgctcaagcggaattcctggacagttttcttgaatcccagaacaaacagttgacagccgccgtgctgttcaaagtccccgaagatgttgttgtgcaacgtttaacctctcgcctgatctgtccgaaatgcgggcgtatctacaatatgatttcactgccaccaaaagaagacgagctgtgtgacgattgcaaagtcaaattagtacagcgtgatgatgataagggggaaacggttcgtcaccgcctgaaagtctaccttgagaagacccagccggtcattgactattatggcaagaaaggtattctcaaacgcgtagatgggtcgcaaggaatcgacaacgttgttgcagaagtcctgaagattattggttggagcgataag

SEQ ID NO: 260 - protein, 231 aa, synthetic construct
  REGION 1..231: note = Variant of adenylate kinase
MHHHHHHGGSGMMAYLVFLGPPGAGKGTQSKRIQEKTGIPHISTGDIFRDIVKKENDELGKKIKEIMEKGELVPDELVNEVVKRRLSEKDCEKGFILDGYPRTVAQAEFLDSFLESQNKQLTAAVLFKVPEDVVVQRLTSRLICPKCGRIYNMISLPPKEDELCDDCKVKLVQRDDDKGETVRHRLKVYLEKTQPVIDYYGKKGILKRVDGSQGIDNVVAEVLKIIGWSDK

SEQ ID NO: 261 - DNA, 693 bp, synthetic construct
  misc_feature 1..693: note = Variant of adenylate kinase
  source 1..693: mol_type = other DNA
atgcaccatcatcaccatcacgggggctccggcatgatggcatatctggtgttcttaggtccgccgggcgcgggaaaaggtacccaatcgaaacgcattcaggaaaagactggcatcccacatattagcacgggcgatatcttccgtgacatcgtcaagaaagagaacgatgaactgggcaagaagattaaagaaatcatggagaaaggtgaactcgttccagatgaactggtgaatgaggtagtaaaacgccgcctgtcggagaaagactgcgaaaaaggctttattttggatggttatccgcgtaccgttgctcaagcggaattcctggatagttttcttgaatcccagaacaaacagttgacagccgccgtgctgttcaaagtccccgaagatgttgttgtgcaacgtttaacctctcgcctgatctgtccgaaatgcgggcgtatctacaacatgatttttctgccaccaaaagaagacgagctgtgtgacgattgcaaagtcaaattagtacagcgtgatgatgataaggaagaaacggttcgtcaccgcctgaaagtctaccttgagaagacccagccggtcattgactattatggcaagaaaggtattctcaaacgcgtagatgggtcgcaaggaatcgacaacgttgttgcagaagtcctgaagattattggttggagcgataag

SEQ ID NO: 262 - protein, 231 aa, synthetic construct
  REGION 1..231: note = Variant of adenylate kinase
MHHHHHHGGSGMMAYLVFLGPPGAGKGTQSKRIQEKTGIPHISTGDIFRDIVKKENDELGKKIKEIMEKGELVPDELVNEVVKRRLSEKDCEKGFILDGYPRTVAQAEFLDSFLESQNKQLTAAVLFKVPEDVVVQRLTSRLICPKCGRIYNMIFLPPKEDELCDDCKVKLVQRDDDKEETVRHRLKVYLEKTQPVIDYYGKKGILKRVDGSQGIDNVVAEVLKIIGWSDK

SEQ ID NO: 263 - DNA, 693 bp, synthetic construct
  misc_feature 1..693: note = Variant of adenylate kinase
  source 1..693: mol_type = other DNA
atgcaccatcatcaccatcacgggggctccggcatgatggcatatctggtgttcttaggtccgccgggcgcgggaaaaggtacccaatcgaaacgcattcaggaaaagactggcatcccacatattagcacgggcgatatcttccgtgacatcgtcaagaaagagaacgatgaagtgggcaagaagattaaagaaatcatggagaaaggtgaactcgttccagatgaactggtgaatgaggtagtaaaacgccgcctgtcggagaaagactgcgaaaaaggctttattttggatggttatccgcgtaccgttgctcaagcggaattcctggacagttttcttgaatcccagaacaaacagttgacagccgccgtgctgttcaaagtccccgaagatgttgttgtgcaacgtttaacctctcgcctgatctgtccgaaatgcgggcgtatctacaatatgatttcactgccaccaaaagaagacgagctgtgtgacgattgcaaagtcaaattagtacagcgtgatgatgataaggaagaaacggttcgtcaccgcctgaaagtctaccttgagaagacccagccggtcattgactattatggcaagaaaggtattctcaaacgcgtagatgggtcgcaaggaatcgacaacgttgttgcagaagtcctgaagattattggttggagcgataag

SEQ ID NO: 264 - protein, 231 aa, synthetic construct
  REGION 1..231: note = Variant of adenylate kinase
MHHHHHHGGSGMMAYLVFLGPPGAGKGTQSKRIQEKTGIPHISTGDIFRDIVKKENDEVGKKIKEIMEKGELVPDELVNEVVKRRLSEKDCEKGFILDGYPRTVAQAEFLDSFLESQNKQLTAAVLFKVPEDVVVQRLTSRLICPKCGRIYNMISLPPKEDELCDDCKVKLVQRDDDKEETVRHRLKVYLEKTQPVIDYYGKKGILKRVDGSQGIDNVVAEVLKIIGWSDK

SEQ ID NO: 265 - DNA, 693 bp, synthetic construct
  misc_feature 1..693: note = Variant of adenylate kinase
  source 1..693: mol_type = other DNA
atgcaccatcatcaccatcacgggggctccggcatgatggcatatctggtgttcttaggtccgccgggcgcgggaaaaggtacccaatcgaaacgcattcaggaaaagactggcatcccacatattagcacgggcgatatcttccgtgacatcgtcaagaaagagaacgatgaactgggcaagaagattaaagaaatcatggagaaaggtgaactcgttccagatgaactggtgctggaggtagtaaaacgccgcctgtcggagaaagactgcgaaaaaggctttattttggatggttatccgcgtaccgttgctcaagcggaattcctggacagttttcttgaatcccagaacaaacagttgacagccgccgtgctgttcaaagtccccgaagatgttgttgtgcaacgtttaacctctcgcctgatctgtccgaaatgcgggcgtatctacaatatgatttcactgccaccaaaagaagacgagctgtgtgacgattgcaaagtcaaattagtacagcgtgatgatgataaggaagaaacggttcgtcaccgcctgaaagtctaccttgagaagacccagccggtcattgactattatggcaagaaaggtattctcaaacgcgtagatgggtcgcaaggaatcgacaacgttgttgcagaagtcctgaagattattggttggagcgataag

SEQ ID NO: 266 - protein, 231 aa, synthetic construct
  REGION 1..231: note = Variant of adenylate kinase
MHHHHHHGGSGMMAYLVFLGPPGAGKGTQSKRIQEKTGIPHISTGDIFRDIVKKENDELGKKIKEIMEKGELVPDELVLEVVKRRLSEKDCEKGFILDGYPRTVAQAEFLDSFLESQNKQLTAAVLFKVPEDVVVQRLTSRLICPKCGRIYNMISLPPKEDELCDDCKVKLVQRDDDKEETVRHRLKVYLEKTQPVIDYYGKKGILKRVDGSQGIDNVVAEVLKIIGWSDK

SEQ ID NO: 267 - DNA, 693 bp, synthetic construct
  misc_feature 1..693: note = Variant of adenylate kinase
  source 1..693: mol_type = other DNA
atgcaccatcatcaccatcacgggggctccggcatgatggcatatctggtgttcttaggtccgccgggcgcgggaaaaggtacccaatcgaaacgcattcaggaaaagactggcatcccacatattagcacgggcgatatcttccgtgacatcgtcaagaaagagaacgatgaactgggcaagaagattaaagaaatcatggagaaaggtgaactcgttccagatgaactggtgaatgaggtagtaaaacgccgcctgtcggagaaagactgcgaaaaaggctttattttggatggttatccgcgtaccgttgctcaagcggaattcctggacagttttcttgaatcccagaacaaacagttgacagccgccgtgctgttcaaagtccccgaagatgttgttgtgcaacgtttaacctctcgcctgatctgtccgaaatgcgggcgtatctacaatatgatttcactgccaccaaaagaagacgagctgtgtgacgattgcaaagtcaaattagtacagcgtgatgatgataaggaagaaacggttcgtcaccgcctgaaagtctaccttgagaagacccagccggtcattgactattatggcaagaaaggtattctcaaacgcgtagatgggtcgcaaggaatcgacaacgttgttgaggaagtcctgaagattattggttggagcgataag

SEQ ID NO: 268 - protein, 231 aa, synthetic construct
  REGION 1..231: note = Variant of adenylate kinase
MHHHHHHGGSGMMAYLVFLGPPGAGKGTQSKRIQEKTGIPHISTGDIFRDIVKKENDELGKKIKEIMEKGELVPDELVNEVVKRRLSEKDCEKGFILDGYPRTVAQAEFLDSFLESQNKQLTAAVLFKVPEDVVVQRLTSRLICPKCGRIYNMISLPPKEDELCDDCKVKLVQRDDDKEETVRHRLKVYLEKTQPVIDYYGKKGILKRVDGSQGIDNVVEEVLKIIGWSDK

SEQ ID NO: 269 - DNA, 693 bp, synthetic construct
  misc_feature 1..693: note = Variant of adenylate kinase
  source 1..693: mol_type = other DNA
atgcaccatcatcaccatcacgggggctccggcatgatggcatatctggtgttcttaggtccgccgggcgcgggaaaaggtacccaatcgaaacgcattcaggaaaagactggcatcccacatattagcacgggcgatatcttccgtgactttgtcaagaaagagaacgatgaactgggcaagaagattaaagaaatcatggagaaaggtgaactcgttccagatgaactggtgaatgaggtagtaaaacgccgcctgtcggagaaagactgcgaaaaaggctttattttggatggttatccgcgtaccgttgctcaagcggaattcctggacagttttcttgaatcccagaacaaacagttgacagccgccgtgctgttcaaagtccccgaagatgttgttgtgcaacgtttaacctctcgcctgatctgtccgaaatgcgggcgtatctacaatatgatttcactgccaccaaaagaagacgagctgtgtgacgattgcaaagtcaaattagtacagcgtgatgatgataaggaagaaacggttcgtcaccgcctgaaagtctaccttgagaagacccagccggtcattgactattatggcaagaaaggtattctcaaacgcgtagatgggtcgcaaggaatcgacaacgttgttgcagaagtcctgaagattattggttggagcgataag

SEQ ID NO: 270 - protein, 231 aa, synthetic construct
  REGION 1..231: note = Variant of adenylate kinase
MHHHHHHGGSGMMAYLVFLGPPGAGKGTQSKRIQEKTGIPHISTGDIFRDFVKKENDELGKKIKEIMEKGELVPDELVNEVVKRRLSEKDCEKGFILDGYPRTVAQAEFLDSFLESQNKQLTAAVLFKVPEDVVVQRLTSRLICPKCGRIYNMISLPPKEDELCDDCKVKLVQRDDDKEETVRHRLKVYLEKTQPVIDYYGKKGILKRVDGSQGIDNVVAEVLKIIGWSDK

SEQ ID NO: 271 - DNA, 693 bp, synthetic construct
  misc_feature 1..693: note = Variant of adenylate kinase
  source 1..693: mol_type = other DNA
atgcaccatcatcaccatcacgggggctccggcatgatggcatatctggtgttcttaggtccgccgggcgcgggaaaaggtacccaatcgaaacgcattcaggaaaagactggcatcccacatattagcacgggcgatatcttccgtgacatcgtcaagaaagagaacgatgaactgggcaagaagattaaagaaatcatggagaaaggtgaactcgttccagatgaactggtgaatgaggtagtaaaacgccgcctgtcggagaaagactgcgaagctggctttattttggatggttatccgcgtaccgttgctcaagcggaattcctggacagttttcttgaatcccagaacaaacagttgacagccgccgtgctgttcaaagtccccgaagatgttgttgtgcaacgtttaacctctcgcctgatctgtccgaaatgcgggcgtatctacaatatgatttcactgccaccaaaagaagacgagctgtgtgacgattgcaaagtcaaattagtacagcgtgatgatgataaggaagaaacggttcgtcaccgcctgaaagtctaccttgagaagacccagccggtcattgactattatggcaagaaaggtattctcaaacgcgtagatgggtcgcaaggaatcgacaacgttgttgcagaagtcctgaagattattggttggagcgataag

SEQ ID NO: 272 - protein, 231 aa, synthetic construct
  REGION 1..231: note = Variant of adenylate kinase
MHHHHHHGGSGMMAYLVFLGPPGAGKGTQSKRIQEKTGIPHISTGDIFRDIVKKENDELGKKIKEIMEKGELVPDELVNEVVKRRLSEKDCEAGFILDGYPRTVAQAEFLDSFLESQNKQLTAAVLFKVPEDVVVQRLTSRLICPKCGRIYNMISLPPKEDELCDDCKVKLVQRDDDKEETVRHRLKVYLEKTQPVIDYYGKKGILKRVDGSQGIDNVVAEVLKIIGWSDK

SEQ ID NO: 273 - DNA, 693 bp, synthetic construct
  misc_feature 1..693: note = Variant of adenylate kinase
  source 1..693: mol_type = other DNA
atgcaccatcatcaccatcacgggggctccggcatgatggcatatctggtgttcttaggtccgccgggcgcgggaaaaggtacccaatcgaaacgcattcaggaaaagactggcatcccacatattagcacgggcgatatcttccgtgacatcgtcaagaaagagaacgatgaactgggcaagaagattaaagaaatcatggagaaaggtgaactcgttccagatgaactggtgaatgaggtagtaaaacgccgcctgtcggagaaagactgcgaaaaaggctttattttggatggttatccgcgtaccgttgctcaagcggaattcctggacagttttcttgaatcccagaacaaacagttgacagccgccgtgctgttcaaagtccccgaagatgttgttgtgcaacgtttaacctctcgcctgatctgtccgaaatgcgggcgtatctacaatatgatttcactgccaccaaaagaagacgagctgtgtgacgattgcaaagtcaaattagtacagcgtgatgatgataaggaagaaacggttcgtcaccgcctgaaagtctaccttgagaagacccagccggtcattgactattatggcaagaaaggtattctcaaacgcgtagatgggtcgcaaggaatcgacaacgttgttgcagaagtcctgaagattctgggttggagcgataag

SEQ ID NO: 274 - protein, 231 aa, synthetic construct
  REGION 1..231: note = Variant of adenylate kinase
MHHHHHHGGSGMMAYLVFLGPPGAGKGTQSKRIQEKTGIPHISTGDIFRDIVKKENDELGKKIKEIMEKGELVPDELVNEVVKRRLSEKDCEKGFILDGYPRTVAQAEFLDSFLESQNKQLTAAVLFKVPEDVVVQRLTSRLICPKCGRIYNMISLPPKEDELCDDCKVKLVQRDDDKEETVRHRLKVYLEKTQPVIDYYGKKGILKRVDGSQGIDNVVAEVLKILGWSDK

SEQ ID NO: 275 - DNA, 693 bp, synthetic construct
  misc_feature 1..693: note = Variant of adenylate kinase
  source 1..693: mol_type = other DNA
atgcaccatcatcaccatcacgggggctccggcatgatggcatatctggtgttcttaggtccgccgggcgcgggaaaaggtacccaatcgaaacgcattcaggaaaagactggcatcccacatattagcacgggcgatatcttccgtgacatcgtcaagaaagagaacgatgaactgggcaagaagattaaagaaatcatggagaaaggtgaactcgttccagatgaactggtgaatgaggtagtaaaacgccgcctgtcggagaaagactgcgaaaaaggctttattttggatggttatccgcgtaccgttgctcaagcgatgttcctggatagttttcttgaatcccagaacaaacagttgacagccgccgtgctgttcaaagtccccgaagatgttgttgtgcaacgtttaacctctcgcctgatctgtccgaaatgcgggcgtatctacaacatgatttttctgccaccaaaagaagacgagctgtgtgacgattgcaaagtcaaattagtacagcgtgatgatgataaggaagaaacggttcgtcaccgcctgaaagtctaccttgagaagacccagccggtcattgactattatggcaagaaaggtattctcaaacgcgtagatgggtcgcaaggaatcgacaacgttgttgcagaagtcctgaagattattggttggagcgataag

SEQ ID NO: 276 - protein, 231 aa, synthetic construct
  REGION 1..231: note = Variant of adenylate kinase
MHHHHHHGGSGMMAYLVFLGPPGAGKGTQSKRIQEKTGIPHISTGDIFRDIVKKENDELGKKIKEIMEKGELVPDELVNEVVKRRLSEKDCEKGFILDGYPRTVAQAMFLDSFLESQNKQLTAAVLFKVPEDVVVQRLTSRLICPKCGRIYNMIFLPPKEDELCDDCKVKLVQRDDDKEETVRHRLKVYLEKTQPVIDYYGKKGILKRVDGSQGIDNVVAEVLKIIGWSDK

SEQ ID NO: 277 - DNA, 693 bp, synthetic construct
  misc_feature 1..693: note = Variant of adenylate kinase
  source 1..693: mol_type = other DNA
atgcaccatcatcaccatcacgggggctccggcatgatggcatatctggtgttcttaggtccgccgggcgcgggaaaaggtacccaatcgaaacgcattcaggaaaagactggcatcccacatattagcacgggcgatatcttccgtgacatcgttaagaaagagaacgatgaactgggcaagaagattaaagaaatcatggagaaaggtgaactcgttccagatgaactggtgaatgaggtagtaaaacgccgcctgtcggagaaagactgcgaaaaaggctttattttggatggttatccgcgtaccgttgctcaagcgatgttcctggagagttttcttgaatcccagaacaaacagttgacagccgccgtgctgttcaaagtccccgaagatgttgttgtgcaacgtttaacctctcgcctgatctgtccgaaatgcgggcgtatctacaatatgatttcactgccaccaaaagaagacgagctgtgtgacgattgcaaagtcaaattagtacagcgtgatgatgataaggaagaaacggttcgtcaccgcctgaaagtctaccttgagaagacccagccggtcattgactattatggcaagaaaggtattctcaaacgcgtagatgggtcgcaaggaatcgacaacgttgttgcagaagtcctgaagattattggttggagcgataag

SEQ ID NO: 278 - protein, 231 aa, synthetic construct
  REGION 1..231: note = Variant of adenylate kinase
MHHHHHHGGSGMMAYLVFLGPPGAGKGTQSKRIQEKTGIPHISTGDIFRDIVKKENDELGKKIKEIMEKGELVPDELVNEVVKRRLSEKDCEKGFILDGYPRTVAQAMFLESFLESQNKQLTAAVLFKVPEDVVVQRLTSRLICPKCGRIYNMISLPPKEDELCDDCKVKLVQRDDDKEETVRHRLKVYLEKTQPVIDYYGKKGILKRVDGSQGIDNVVAEVLKIIGWSDK

SEQ ID NO: 279 - DNA, 693 bp, synthetic construct
  misc_feature 1..693: note = Variant of adenylate kinase
  source 1..693: mol_type = other DNA
atgcaccatcatcaccatcacgggggctccggcatgatggcatatctggtgttcttaggtccgccgggcgcgggaaaaggtacccaatcgaaacgcattcaggaaaagactggcatcccacatattagcacgggcgatatcttccgtgacatcgtcaagaaagagaacgatgaactgggcaagaagattaaagaaatcatggagaaaggtgaactcgttccagatgaactggtgaatgaggtagtaaaacgccgcctgtcggagaaagactgcgaaaaaggctttattttggatggttatccgcgtaccgttgctcaagcggaattcctggagagttttcttgaatcccagaacaaacagttgacagccgccgtgctgttcaaagtccccgaagatgttgttgtgcaacgtttaacctctcgcctgatctgtccgaaatgcgggcgtatctacaatatgatttcactgccaccaaaagaagacgagctgtgtgacgattgcaaagtcaaattagtacagcgtgatgatgataaggaagaaacggttcgtcaccgcctgaaagtctaccttgagaagacccagccggtcattgactattatggcaagaaaggtattctcaaacgcgtagatgggtcgcaaggaatcgacaacgttgttgcagaagtcctgaagattattggttggagcgataag

SEQ ID NO: 280 - protein, 231 aa, synthetic construct
  REGION 1..231: note = Variant of adenylate kinase
MHHHHHHGGSGMMAYLVFLGPPGAGKGTQSKRIQEKTGIPHISTGDIFRDIVKKENDELGKKIKEIMEKGELVPDELVNEVVKRRLSEKDCEKGFILDGYPRTVAQAEFLESFLESQNKQLTAAVLFKVPEDVVVQRLTSRLICPKCGRIYNMISLPPKEDELCDDCKVKLVQRDDDKEETVRHRLKVYLEKTQPVIDYYGKKGILKRVDGSQGIDNVVAEVLKIIGWSDK

SEQ ID NO: 281 - DNA, 693 bp, synthetic construct
  misc_feature 1..693: note = Variant of adenylate kinase
  source 1..693: mol_type = other DNA
atgcaccatcatcaccatcacgggggctccggcatgatggcatatctggtgttcttaggtccgccgggcgcgggaaaaggtacccaatcgaaacgcattcaggaaaagactggcatcccacatattagcacgggcgatatcttccgtgacatcgtcaagaaagagaacgatgaactgggcaagaagattaaagaaatcatggagcagggtgaactcgttccagatgaactggtgaatgaggtagtaaaacgccgcctgtcgaacaaagactgcgaaaaaggctttattttggatggttatccgcgtaccgttgctcaagcggaattcctggacagttttcttgaatcccagaacaaacagttgacagccgccgtgctgttcaaagtccccgaagatgttgttgtgcaacgtttaacctctcgcctgatctgtccgaaatgcgggcgtatctacaatatgatttcactgccaccaaaagaagacgagctgtgtgacgattgcaaagtcaaattagtacagcgtgatgatgataaggaagaaacggttcgtcaccgcctgaaagtctaccttgagaagacccagccggtcattgactattatggcaagaaaggtattctcaaacgcgtagatgggtcgcaaggaatcgacaacgttgttgcagaagtcctgaagattattggttggagcgataag

SEQ ID NO: 282 - protein, 231 aa, synthetic construct
  REGION 1..231: note = Variant of adenylate kinase
MHHHHHHGGSGMMAYLVFLGPPGAGKGTQSKRIQEKTGIPHISTGDIFRDIVKKENDELGKKIKEIMEQGELVPDELVNEVVKRRLSNKDCEKGFILDGYPRTVAQAEFLDSFLESQNKQLTAAVLFKVPEDVVVQRLTSRLICPKCGRIYNMISLPPKEDELCDDCKVKLVQRDDDKEETVRHRLKVYLEKTQPVIDYYGKKGILKRVDGSQGIDNVVAEVLKIIGWSDK

SEQ ID NO: 283 - DNA, 693 bp, synthetic construct
  misc_feature 1..693: note = Variant of adenylate kinase
  source 1..693: mol_type = other DNA
atgcaccatcatcaccatcacgggggctccggcatgatggcatatctggtgttcttaggtccgccgggcgcgggaaaaggtacccaatcgaaacgcattcaggaaaagactggcatccctcatattggtacgggcgatatcttccgtgacatcgtcaagaaagagaacgatgaactgggcaagaagattaaagaaatcatggagaagggtgaactcgttccagatgaactggtgaatgaggtagtaaaacgccgcctgtcggagaaagactgcgaaaaaggctttattttggatggttatccgcgtaccgttgctcaagcggaattcctggacagttttcttgaatcccagaacaaacagttgacagccgccgtgctgttcaaagtccccgaagatgtggtggtacaacgtttaacctctcgcctgatctgtccgaaatgcgggcgtatctacaatatgatttcactgccaccaaaagaagacgagctgtgtgacgattgcaaagtcaaattagtacagcgtgatgatgataaggaagaaacggttcgtcaccgcctgaaagtctaccttgagaagacccagccggtcattgactattatggcaagaaaggtattctcaaacgcgtagatgggtcgcaaggaatcgacaacgttgttgcagaagtcctgaagattattggttggagcgataag

SEQ ID NO: 284 - protein, 231 aa, synthetic construct
  REGION 1..231: note = Variant of adenylate kinase
MHHHHHHGGSGMMAYLVFLGPPGAGKGTQSKRIQEKTGIPHIGTGDIFRDIVKKENDELGKKIKEIMEKGELVPDELVNEVVKRRLSEKDCEKGFILDGYPRTVAQAEFLDSFLESQNKQLTAAVLFKVPEDVVVQRLTSRLICPKCGRIYNMISLPPKEDELCDDCKVKLVQRDDDKEETVRHRLKVYLEKTQPVIDYYGKKGILKRVDGSQGIDNVVAEVLKIIGWSDK

SEQ ID NO: 285 - DNA, 693 bp, synthetic construct
  misc_feature 1..693: note = Variant of adenylate kinase
  source 1..693: mol_type = other DNA
atgcaccatcatcaccatcacgggggctccggcatgatggcatatctggtgttcttaggtccgccgggcgcgggaaaaggtacccaatcgaaacgcattcaggaaaagactggcatccctcatattggtacgggcgatatcttccgtgacatcgtcaagaaagagaacgatgaactgggcaagaagattaaagaaatcatggagcagggtgaactcgttccagatgaactggtgaatgaggtagtaaaacgccgcctgtcggagaaagactgcgaaaaaggctttattttggatggttatccgcgtaccgttgctcaagcggaattcctggacagttttcttgaatcccagaacaaacagttgacagccgccgtgctgttcaaagtccccgaagatgttgttgtgcagcgtatcaccagccgcctgatctgtccgaaatgcgggcgtatctacaatatgatttcactgccaccaaaagaagacgagctgtgtgacgattgcaaagtcaaattagtacagcgtgatgatgataaggaagaaacggttcgtcaccgcctgaaagtctaccttgagaagacccagccggtcattgactattatggcaagaaaggtattctcaaacgcgtagatgggtcgcaaggaatcgacaacgttgttgcagaagtcctgaagattattggttggagcgataag

SEQ ID NO: 286 - protein, 231 aa, synthetic construct
  REGION 1..231: note = Variant of adenylate kinase
MHHHHHHGGSGMMAYLVFLGPPGAGKGTQSKRIQEKTGIPHIGTGDIFRDIVKKENDELGKKIKEIMEQGELVPDELVNEVVKRRLSEKDCEKGFILDGYPRTVAQAEFLDSFLESQNKQLTAAVLFKVPEDVVVQRITSRLICPKCGRIYNMISLPPKEDELCDDCKVKLVQRDDDKEETVRHRLKVYLEKTQPVIDYYGKKGILKRVDGSQGIDNVVAEVLKIIGWSDK

SEQ ID NO: 287 - DNA, 693 bp, synthetic construct
  misc_feature 1..693: note = Variant of adenylate kinase
  source 1..693: mol_type = other DNA
atgcaccatcatcaccatcacgggggctccggcatgatggcatatctggtgttcttaggtccgccgggcgcgggaaaaggtacccaatcgaaacgcattcaggaaaagactggcatctgccatattggtacgggcgatatcttccgtgacatcgtcaagaaagagaacgatgaactgggcaagaagattaaagaaatcatggagaaaggtgaactcgttccagatgaactggtgaatgaggtagtaaaacgccgcctgtcgaacaaagactgcgaaaaaggctttattttggatggttatccgcgtaccgttgctcaagcggaattcctggacagttttcttgaatcccagaacaaacagttgacagccgccgtgctgttcaaagtccccgaagatgtgctggtacaacgtttaacctctcgcctgatctgtccgaaatgcgggcgtatctacaatatgatttcactgccaccaaaagaagacgagctgtgtgacgattgcaaagtcaaattagtacagcgtgatgatgataacgaagaaacggttcgtcaccgcctgaaagtctaccttgagaagacccagccggtcattgactattatggcaagaaaggtattctcaaacgcgtagatgggtcgcaaggaatcgacaacgttgttgcagaagtcctgaagattattggttggagcgataag

SEQ ID NO: 288 - protein, 231 aa, synthetic construct
  REGION 1..231: note = Variant of adenylate kinase
MHHHHHHGGSGMMAYLVFLGPPGAGKGTQSKRIQEKTGICHIGTGDIFRDIVKKENDELGKKIKEIMEKGELVPDELVNEVVKRRLSNKDCEKGFILDGYPRTVAQAEFLDSFLESQNKQLTAAVLFKVPEDVLVQRLTSRLICPKCGRIYNMISLPPKEDELCDDCKVKLVQRDDDNEETVRHRLKVYLEKTQPVIDYYGKKGILKRVDGSQGIDNVVAEVLKIIGWSDK

SEQ ID NO: 289 - DNA, 693 bp, synthetic construct
  misc_feature 1..693: note = Variant of adenylate kinase
  source 1..693: mol_type = other DNA
atgcaccatcatcaccatcacgggggctccggcatgatggcatatctggtgttcttaggtccgccgggcgcgggaaaaggtacccaatcgaaacgcattcaggaaaagactggcatcccacatattagcacgggcgatatcttccgtgacatcgtcaagaaagagaacgatgaactgggcaagaagattaaagaaatcatggagaaaggtgaactcgttccagatgaactggtgaatgaggtagtaaaacgccgcctgtcggagaaagactgcgaaaaaggctttattttggatggttatccgcgtaccgttgctcaagcggaattcctggacagttttcttgaatcccagaacaaacagttgacagccgccgtgctgttcaaagtccccgaagatgttgttgtgcaacgtttaacctctcgcctgatctgtccgaaatgcgggcgtatctacaatatgatttcactgccaccaaaagaagacgagctgtgtgacgattgcaaagtcaaattagtacagcgtgatgatgataaggaagaaacggttcgtcatcgcctgaaagtctaccttgagaagacccagccggtcattgactattatggcaagaaaggtattctcaaacgcgtagatgggtcgcaaccaatcgacaacgttgttgcagaagtcctgaagattattggttggagcgataag

SEQ ID NO: 290 - protein, 231 aa, synthetic construct
  REGION 1..231: note = Variant of adenylate kinase
MHHHHHHGGSGMMAYLVFLGPPGAGKGTQSKRIQEKTGIPHISTGDIFRDIVKKENDELGKKIKEIMEKGELVPDELVNEVVKRRLSEKDCEKGFILDGYPRTVAQAEFLDSFLESQNKQLTAAVLFKVPEDVVVQRLTSRLICPKCGRIYNMISLPPKEDELCDDCKVKLVQRDDDKEETVRHRLKVYLEKTQPVIDYYGKKGILKRVDGSQPIDNVVAEVLKIIGWSDK

SEQ ID NO: 291 - DNA, 693 bp, synthetic construct
  misc_feature 1..693: note = Variant of adenylate kinase
  source 1..693: mol_type = other DNA
atgcaccatcatcaccatcacgggggctccggcatgatggcatatctggtgttcttaggtccgccgggcgcgggaaaaggtacccaatcgaaacgcattcaggaaaagactggcatcccacatattagcacgggcgatatcttccgtgacatcgtcaagaaagagaacgatgaactgggcaagaagattaaagaaatcatggagaaaggtgaactcgttccagatgaactggtgaataacgtaattaaacgccgcctgtcggagaaagactgcgaaaaaggctttattttggatggttatccgcgtaccgttgctcaagcggaattcctggacagttttcttgaatcccagaacaaacagttgacagccgccgtgctgttcaaagtccccgaagatgttgttgtgcaacgtttaacctctcgcctgatctgtccgaaatgcgggcgtatctacaatatgatttcactgccaccaaaagaagacgagctgtgtgacgattgcaaagtcaaattagtacagcgtgatgatgataaggaagaaacggttcgtaaacgcctgaaagtctaccttgagaagacccagccggtcattgactattatggcaagaaaggtattctgaaacgcgtagatgggtcgcaaggaattgataacgtttgggcagaagtcctgaagattattggttggagcgataag

SEQ ID NO: 292 - protein, 231 aa, synthetic construct
  REGION 1..231: note = Variant of adenylate kinase
MHHHHHHGGSGMMAYLVFLGPPGAGKGTQSKRIQEKTGIPHISTGDIFRDIVKKENDELGKKIKEIMEKGELVPDELVNNVIKRRLSEKDCEKGFILDGYPRTVAQAEFLDSFLESQNKQLTAAVLFKVPEDVVVQRLTSRLICPKCGRIYNMISLPPKEDELCDDCKVKLVQRDDDKEETVRKRLKVYLEKTQPVIDYYGKKGILKRVDGSQGIDNVWAEVLKIIGWSDK

SEQ ID NO: 293 - DNA, 693 bp, synthetic construct
  misc_feature 1..693: note = Variant of adenylate kinase
  source 1..693: mol_type = other DNA
atgcaccatcatcaccatcacgggggctccggcatgatggcatatctggtgttcttaggtccgccgggcgcgggaaaaggtacccaatcgaaacgcattcaggaaaagactggcatcccacatattagcacgggcgatatcttccgtgacatcgtcaagaaagagaacgatgaactgggcaagaagattaaagaaatcatggagaaaggtgaactcgttccagatgaactggtgaatgaggtagtaaaacgccgcctgtcgaacaaagactgcgaaaaaggctttattttggatggttatccgcgtaccgttgctcaagcggaattcctggacagttttcttgaatcccagaacaaacagttgacagccgccgtgctgttcaaagtccccgaagatgttgttgtggctcgtctgaccagccgcctgatctgtccgaaatgcgggcgtatctacaatatgatttcactgccaccaaaagaagacgagctgtgtgacgattgcaaagtcaaattagtacagcgtgatgatgataaggaagaaacggttcgtcaccgcctgaaagtctaccttgagaagacccagccggtcattgactattatggcaagaaaggtattctcaaacgcgtagatgggtcgcaaggaatcgacaacgttgttgcagaagtcctgaagattattggttggagcgataag

SEQ ID NO: 294 - protein, 231 aa, synthetic construct
  REGION 1..231: note = Variant of adenylate kinase
MHHHHHHGGSGMMAYLVFLGPPGAGKGTQSKRIQEKTGIPHISTGDIFRDIVKKENDELGKKIKEIMEKGELVPDELVNEVVKRRLSNKDCEKGFILDGYPRTVAQAEFLDSFLESQNKQLTAAVLFKVPEDVVVARLTSRLICPKCGRIYNMISLPPKEDELCDDCKVKLVQRDDDKEETVRHRLKVYLEKTQPVIDYYGKKGILKRVDGSQGIDNVVAEVLKIIGWSDK

SEQ ID NO: 295 - DNA, 693 bp, synthetic construct
  misc_feature 1..693: note = Variant of adenylate kinase
  source 1..693: mol_type = other DNA
atgcaccatcatcaccatcacgggggctccggcatgatggcatatatggtgttcttaggtccgccgggcgcgggaaaaggtacccaatcgaaacgcattcaggaaaagactggcatctgccatattggtacgggcgatatcttccgtgacatcgtcaagaaagagaacgatgaactgggcaagaagattaaagaaatcatggagaaaggtgaactcgttccagatgaactggtgaatgaggtagtaaaacgccgcctgtcgaacaaagactgcgaaaaaggctttattttggatggttatccgcgtaccgttgctcaagcggaattcctggacagttttcttgaatcccagaacaaacagttgacagccgccgtgctgttcaaagtccccgaagatgttgttgtgcaacgtttaacctctcgcctgatctgtccgaaatgcgggcgtatctacaatatgatttcactgccaccaaaagaagacgagctgtgtgacgattgcaaagtcaaattagtacagcgtgatgatgataaggaagaaacggttcgtcaccgcctgaaagtctaccttgagaagacccagccggtcattgactattatggcaagaaaggtattctcaaacgcgtagatgggtcgcaaggaatcgacaacgttgttgcagaagtcctgaagattattggttggagcgataag

SEQ ID NO: 296 - protein, 231 aa, synthetic construct
  REGION 1..231: note = Variant of adenylate kinase
MHHHHHHGGSGMMAYMVFLGPPGAGKGTQSKRIQEKTGICHIGTGDIFRDIVKKENDELGKKIKEIMEKGELVPDELVNEVVKRRLSNKDCEKGFILDGYPRTVAQAEFLDSFLESQNKQLTAAVLFKVPEDVVVQRLTSRLICPKCGRIYNMISLPPKEDELCDDCKVKLVQRDDDKEETVRHRLKVYLEKTQPVIDYYGKKGILKRVDGSQGIDNVVAEVLKIIGWSDK

SEQ ID NO: 297 - DNA, 693 bp, synthetic construct
  misc_feature 1..693: note = Variant of adenylate kinase
  source 1..693: mol_type = other DNA
atgcaccatcatcaccatcacgggggctccggcatgatggcatatctggtgttcttaggtccgccgggcgcgggaaaaggtacccaatcgaaacgcattcaggaaaagactggcatctgccatattagtacgggcgatatcttccgtgacatcgtcaagaaagagaacgatgaactgggcaagaagattaaagaaatcatggagaaaggtgaactcgttccagatgaactggtgaatgaggtagtaaaacgccgcctgtcggagaaagactgcgaaaaaggctttattttggatggttatccgcgtaccgttgctcaagcggaattcctggacagttttcttgaatcccagaacaaacagttgacagccgccgtgctgttcaaagtccccgaagatgtgctggtacaacgtttaacctctcgcctgatctgtccgaaatgcgggcgtatctacaatatgatttcactgccaccaaaagaagacgagctgtgtgacgattgcaaagtcaaattagtacagcgtgatgatgataaggaagaaacggttcgtcaccgcctgaaagtctaccttgagaagacccagccggtcattgactattatggcaagaaaggtattctcaaacgcgtagatgggtcgcaaggaatcgacaacgttgttgcagaagtcctgaagattattggttggagcgataag

SEQ ID NO: 298 - protein, 231 aa, synthetic construct
  REGION 1..231: note = Variant of adenylate kinase
MHHHHHHGGSGMMAYLVFLGPPGAGKGTQSKRIQEKTGICHISTGDIFRDIVKKENDELGKKIKEIMEKGELVPDELVNEVVKRRLSEKDCEKGFILDGYPRTVAQAEFLDSFLESQNKQLTAAVLFKVPEDVLVQRLTSRLICPKCGRIYNMISLPPKEDELCDDCKVKLVQRDDDKEETVRHRLKVYLEKTQPVIDYYGKKGILKRVDGSQGIDNVVAEVLKIIGWSDK

SEQ ID NO: 299 - DNA, 693 bp, synthetic construct
  misc_feature 1..693: note = Variant of adenylate kinase
  source 1..693: mol_type = other DNA
atgcaccatcatcaccatcacgggggctccggcatgatggcatatctggtgttcttaggtccgccgggcgcgggaaaaggtacccaatcgaaacgcattcaggaaaagactggcatcccacatattagcacgggcgatatcttccgtgacatcgtcaagaaagagaacgatgaactgggcaagaagattaaagaaatcatggagaaaggtgaactcgttccagatgaactggtgaatgaggtagtaaaacgccgcctgtcgaacaaagactgcgaaaaaggctttattttggatggttatccgcgtaccgttgctcaagcggaattcctggacagttttcttgaatcccagaacaaacagttgacagccgccgtgctgttcaaagtccccgaagatgttgttgtgcaacgtttaacctctcgcctgatctgtccgaaatgcgggcgtatctacaatatgatttcactgccaccaaaagaagacgagctgtgtgacgattgcaaagtcaaattagtacagcgtgatgatgataaggaagaaacggttcgtcaccgcctgaaagtctaccttgagaagacccagccggtcattgactattatggcaagaaaggtattctcaaacgcgtagatgggtcgcaaggaatcgacaacgttgttgcagaagtcctgaagattattggttggagcgataag

SEQ ID NO: 300 - protein, 231 aa, synthetic construct
  REGION 1..231: note = Variant of adenylate kinase
MHHHHHHGGSGMMAYLVFLGPPGAGKGTQSKRIQEKTGIPHISTGDIFRDIVKKENDELGKKIKEIMEKGELVPDELVNEVVKRRLSNKDCEKGFILDGYPRTVAQAEFLDSFLESQNKQLTAAVLFKVPEDVVVQRLTSRLICPKCGRIYNMISLPPKEDELCDDCKVKLVQRDDDKEETVRHRLKVYLEKTQPVIDYYGKKGILKRVDGSQGIDNVVAEVLKIIGWSDK

SEQ ID NO: 301 - DNA, 693 bp, synthetic construct
  misc_feature 1..693: note = Variant of adenylate kinase
  source 1..693: mol_type = other DNA
atgcaccatcatcaccatcacgggggctccggcatgatggcatatctggtgttcttaggtccgccgggcgcgggaaaaggtacccaatcgaaacgcattcaggaaaagactggcatcccacatattagcacgggcgatatcttccgtgacatcgttaagaaagagaacgatgaactgggcaagaagattaaagaaatcatggagaaaggtgaactcgttccagatgaactggtgaatgaggtagtaaaacgccgcctgtcggagaaagactgcgaaaaaggctttattttggatggttatccgcgtaccgttgctcaagcggaattcctggagagttttcttgaatcccagaacaaacagttgacagccgccgtgctgttcaaagtccccgaagatgttgttgtgcaacgtttaacctctcgcctgatctgtccgaaatgcgggcgtatctacaacatgatttttctgccaccaaaagaagacgagctgtgtgacgattgcaaagtcaaattagtacagcgtgatgatgataaggaagaaacggttcgtcaccgcctgaaagtctaccttgagaagacccagccggtcattgactattatggcaagaaaggtattctcaaacgcgtagatgggtcgcaaggaatcgacaacgttgttgcagaagtcctgaagattattggttggagcgataag

SEQ ID NO: 302 - protein, 231 aa, synthetic construct
  REGION 1..231: note = Variant of adenylate kinase
MHHHHHHGGSGMMAYLVFLGPPGAGKGTQSKRIQEKTGIPHISTGDIFRDIVKKENDELGKKIKEIMEKGELVPDELVNEVVKRRLSEKDCEKGFILDGYPRTVAQAEFLESFLESQNKQLTAAVLFKVPEDVVVQRLTSRLICPKCGRIYNMIFLPPKEDELCDDCKVKLVQRDDDKEETVRHRLKVYLEKTQPVIDYYGKKGILKRVDGSQGIDNVVAEVLKIIGWSDK

SEQ ID NO: 303 - DNA, 693 bp, synthetic construct
  misc_feature 1..693: note = Variant of adenylate kinase
  source 1..693: mol_type = other DNA
atgcaccatcatcaccatcacgggggctccggcatgatggcatatctggtgttcttaggtccgccgggcgcgggaaaaggtacccaatcgaaacgcattcaggaaaagactggcatcccacatattagcacgggcgatatcttccgtgacatcgtcaagaaagagaacgatgaactgggcaagaagattaaagaaatcatggagaaaggtgaactcgttccagatgaactggtgaatgaggtagtaaaacgccgcctgtcggagaaagactgcgaaaaaggctttattttggatggttatccgcgtaccgttgctcaagcggaattcctggacagttttcttgaatcccagaacaaacagttgacagccgccgtgctgttcaaagtccccgaagatgttgttgtgcaacgtttaacctctcgcctgatctgtccgaaatgcgggcgtatctacaatatgatttcactgccaccaaaagaagacgagctgtgtgacgattgcaaagtcaaattagtacagcgtgatgatgataaggaagaaacggttcgtcaccgcctgaaagtctaccttgagaagacccagccggtcattgactattatggcaagaaaggtattctcaaacgcgtagatgggtcgcaaggaatcgacaacgttgttgcagaagtcacgaagattattggttggagcgataag

SEQ ID NO: 304 - protein, 231 aa, synthetic construct
  REGION 1..231: note = Variant of adenylate kinase
MHHHHHHGGSGMMAYLVFLGPPGAGKGTQSKRIQEKTGIPHISTGDIFRDIVKKENDELGKKIKEIMEKGELVPDELVNEVVKRRLSEKDCEKGFILDGYPRTVAQAEFLDSFLESQNKQLTAAVLFKVPEDVVVQRLTSRLICPKCGRIYNMISLPPKEDELCDDCKVKLVQRDDDKEETVRHRLKVYLEKTQPVIDYYGKKGILKRVDGSQGIDNVVAEVTKIIGWSDK

SEQ ID NO: 305 - DNA, 693 bp, synthetic construct
  misc_feature 1..693: note = Variant of adenylate kinase
  source 1..693: mol_type = other DNA
atgcaccatcatcaccatcacgggggctccggcatgatggcatatctggtgttcttaggtccgccgggcgcgggaaaaggtacccaatcgaaacgcattcaggaaaagactggcatcccacatattagcacgggcgatatcttccgtgacatcgtcaagaaagagaacgatgaactgggcaagaagattaaagaaatcatggagaaaggtgaactcgttggtgatgaactggtgaatgaggtagtaaaacgccgcctgtcggagaaagactgcgaaaaaggctttattttggatggttatccgcgtaccgttgctcaagcggaattcctggacagttttcttgaatcccagaacaaacagttgacagccgccgtgctgttcaaagtccccgaagatgttgttgtgcaacgtttaacctctcgcctgatctgtccgaaatgcgggcgtatctacaatatgatttcactgccaccaaaagaagacgagctgtgtgacgattgcaaagtcaaattagtacagcgtgatgatgataaggaagaaacggttcgtcaccgcctgaaagtctaccttgagaagacccagccggtcattgactattatggcaagaaaggtattctcaaacgcgtagatgggtcgcaaggaatcgacaacgttgttgcagaagtcctgaagattattggttggagcgataag

SEQ ID NO: 306 - protein, 231 aa, synthetic construct
  REGION 1..231: note = Variant of adenylate kinase
MHHHHHHGGSGMMAYLVFLGPPGAGKGTQSKRIQEKTGIPHISTGDIFRDIVKKENDELGKKIKEIMEKGELVGDELVNEVVKRRLSEKDCEKGFILDGYPRTVAQAEFLDSFLESQNKQLTAAVLFKVPEDVVVQRLTSRLICPKCGRIYNMISLPPKEDELCDDCKVKLVQRDDDKEETVRHRLKVYLEKTQPVIDYYGKKGILKRVDGSQGIDNVVAEVLKIIGWSDK

SEQ ID NO: 307 - DNA, 693 bp, synthetic construct
  misc_feature 1..693: note = Variant of adenylate kinase
  source 1..693: mol_type = other DNA
atgcaccatcatcaccatcacgggggctccggcatgatggcatatctggtgttcttaggtccgccgggcgcgggaaaaggtacccaatcgaaacgcattcaggaaaagactggcatcccacatattagcacgggcgatatcttccgtgacatcgtcaagaaagagaacgatgaactgggcaagaagattaaagaaatcatggagaaaggtgaactcgttccagatgaactggtgaatgaggtagtaaaacgccgcctgtcggagaaagactgcgaaaaaggctttattttggatggttatccgcgtaccgttgctcaagcggaattcctggacagttttcttaggtcccagaacaaacagttgacagccgccgtgctgttcaaagtccccgaagatgttgttgtgcaacgtttaacctctcgcctgatctgtccgaaatgcgggcgtatctacaatatgatttcactgccaccaaaagaagacgagctgtgtgacgattgcaaagtcaaattagtacagcgtgatgatgataaggaagaaacggttcgtcaccgcctgaaagtctaccttgagaagacccagccggtcattgactattatggcaagaaaggtattctcaaacgcgtagatgggtcgcaaggaatcgacaacgttgttgcagaagtcctgaagattattggttggagcgataag

SEQ ID NO: 308 - protein, 231 aa, synthetic construct
  REGION 1..231: note = Variant of adenylate kinase
MHHHHHHGGSGMMAYLVFLGPPGAGKGTQSKRIQEKTGIPHISTGDIFRDIVKKENDELGKKIKEIMEKGELVPDELVNEVVKRRLSEKDCEKGFILDGYPRTVAQAEFLDSFLRSQNKQLTAAVLFKVPEDVVVQRLTSRLICPKCGRIYNMISLPPKEDELCDDCKVKLVQRDDDKEETVRHRLKVYLEKTQPVIDYYGKKGILKRVDGSQGIDNVVAEVLKIIGWSDK

SEQ ID NO: 309 - DNA, 693 bp, synthetic construct
  misc_feature 1..693: note = Variant of adenylate kinase
  source 1..693: mol_type = other DNA
atgcaccatcatcaccatcacgggggctccggcatgatggcatatctggtgttcttaggtccgccgggcgcgggaaaaggtacccaatcgaaacgcattcaggaaaagactggccagccacatattagcacgggcgatatcttccgtgacatcgtcaagaaagagaacgatgaactgggcaagaagattaaagaaatcatggagaaaggtgaactcgttccagatgaactggtgaatgaggtagtaaaacgccgcctgtcggagaaagactgcgaaaaaggctttattttggatggttatccgcgtaccgttgctcaagcggaattcctggacagttttcttgaatcccagaacaaacagttgacagccgccgtgctgttcaaagtccccgaagatgttgttgtgcaacgtttaacctctcgcctgatctgtccgaaatgcgggcgtatctacaatatgatttcactgccaccaaaagaagacgagctgtgtgacgattgcaaagtcaaattagtacagcgtgatgatgataaggaagaaacggttcgtcaccgcctgaaagtctaccttgagaagacccagccggtcattgactattatggcaagaaaggtattctcaaacgcgtagatgggtcgcaaggaatcgacaacgttgttgcagaagtcctgaagattattggttggagcgataag

SEQ ID NO: 310 - protein, 231 aa, synthetic construct
  REGION 1..231: note = Variant of adenylate kinase
MHHHHHHGGSGMMAYLVFLGPPGAGKGTQSKRIQEKTGQPHISTGDIFRDIVKKENDELGKKIKEIMEKGELVPDELVNEVVKRRLSEKDCEKGFILDGYPRTVAQAEFLDSFLESQNKQLTAAVLFKVPEDVVVQRLTSRLICPKCGRIYNMISLPPKEDELCDDCKVKLVQRDDDKEETVRHRLKVYLEKTQPVIDYYGKKGILKRVDGSQGIDNVVAEVLKIIGWSDK

SEQ ID NO: 311 - DNA, 693 bp, synthetic construct
  misc_feature 1..693: note = Variant of adenylate kinase
  source 1..693: mol_type = other DNA
atgcaccatcatcaccatcacgggggctccggcatgatggcatatctggtgttcttaggtccgccgggcgcgggaaagggtacccaatcgaaacgcattcaggaaaagactggcatcccacatattagcacgggcgatatcttccgtgacatcgtcaagaaagagaacgatgaactgggcaagaagattaaagaaatcatggagaaaggtgaactcgttccagatgaactggtgaatgaggtagtaaaacgccgcctgtcggagaaagactgcgaagagggctttattttggatggttatccgcgtaccgttgctcaagcggaattcctggacagttttcttgaatcccagaacaaacagttgacagccgccgtgctgttcaaagtccccgaagatgttgttgtgcaacgtttaacctctcgcctgatctgtccgaaatgcgggcgtatctacaatatgatttcactgccaccaaaagaagacgagctgtgtgacgattgcaaagtcaaattagtacagcgtgatgatgataaggaagaaacggttcgtcaccgcctgaaagtctaccttgagaagacccagccggtcattgactattatggcaagaaaggtattctcaaacgcgtagatgggtcgcaaggaatcgacaacgttgttgcagaagtcctgaagattattggttggagcgataag

SEQ ID NO: 312 - protein, 231 aa, synthetic construct
  REGION 1..231: note = Variant of adenylate kinase
MHHHHHHGGSGMMAYLVFLGPPGAGKGTQSKRIQEKTGIPHISTGDIFRDIVKKENDELGKKIKEIMEKGELVPDELVNEVVKRRLSEKDCEEGFILDGYPRTVAQAEFLDSFLESQNKQLTAAVLFKVPEDVVVQRLTSRLICPKCGRIYNMISLPPKEDELCDDCKVKLVQRDDDKEETVRHRLKVYLEKTQPVIDYYGKKGILKRVDGSQGIDNVVAEVLKIIGWSDK

SEQ ID NO: 313 - DNA, 693 bp, synthetic construct
  misc_feature 1..693: note = Variant of adenylate kinase
  source 1..693: mol_type = other DNA
atgcaccatcatcaccatcacgggggctccggcatgatggcatatctggtgttcttaggtccgccgggcgcgggaaaaggtacccaatcgaaacgcattcaggaaaagactggcatcccacatattagcacgggcgatatcttccgtgacatcgtcaagaaagagaacgatgaactgggcaagaagattaaagaaatcatggagaaaggtgaactcgttccagatgaactggtgaatgaggtagtaaaacgccgcctgtcggagaaagactgcgaaaaaggctttattttggatggttatccgcgtaccgttgctcaagcggaattcctggacagttttcttgaatcccagaacctgcagttgacagccgccgtgctgttcaaagtccccgaagatgttgttgtgcaacgtttaacctctcgcctgatctgtccgaaatgcgggcgtatctacaatatgatttcactgccaccaaaagaagacgagctgtgtgacgattgcaaagtcaaattagtacagcgtgatgatgataaggaagaaacggttcgtcaccgcctgaaagtctaccttgagaagacccagccggtcattgactattatggcaagaaaggtattctcaaacgcgtagatgggtcgcaaggaatcgacaacgttgttgcagaagtcctgaagattattggttggagcgataag

SEQ ID NO: 314 - protein, 231 aa, synthetic construct
  REGION 1..231: note = Variant of adenylate kinase
MHHHHHHGGSGMMAYLVFLGPPGAGKGTQSKRIQEKTGIPHISTGDIFRDIVKKENDELGKKIKEIMEKGELVPDELVNEVVKRRLSEKDCEKGFILDGYPRTVAQAEFLDSFLESQNLQLTAAVLFKVPEDVVVQRLTSRLICPKCGRIYNMISLPPKEDELCDDCKVKLVQRDDDKEETVRHRLKVYLEKTQPVIDYYGKKGILKRVDGSQGIDNVVAEVLKIIGWSDK

SEQ ID NO: 315 - DNA, 693 bp, synthetic construct
  misc_feature 1..693: note = Variant of adenylate kinase
  source 1..693: mol_type = other DNA
atgcaccatcatcaccatcacgggggctccggcatgatggcatatctggtgttcttaggtccgccgggcgcgggaaaaggtacccaatcgaaacgcattcaggaaaagactggcatcccacatattagcacgggcgatatcttccgtgacatcgtcaagaaagagaacgatgaactgggcaagaagattaaagaaatcatggagaaaggtgaactcgttccagatgaactggtgaatgaggtagtaaaacgccgcctgtcggagaaagactgcgaaaaaggctttattttggatggttatccgcgtaccgttgctcaagcggaattcctggacagttttcttgaatcccagaacaaacagttgacagccgccgtgctgttcaaagtccccgaagatgttgttgtgcaacgtttaacctctcgcctgatctgtccgaaatgcgggcgtatctacaatatgatttcactgccaccaaaagaagacgagctgtgtgacgattgcaaagtcaaattagtacagcgtgatgatgataaggaagaaacggttcgtcaccgcctgaaagtctacaatgagaagacccagccggtcattgactattatggcaagaaaggtattctcaaacgcgtagatgggtcgcaaggaatcgacaacgttgttgcagaagtcctgaagattattggttggagcgataag

SEQ ID NO: 316 - protein, 231 aa, synthetic construct
  REGION 1..231: note = Variant of adenylate kinase
MHHHHHHGGSGMMAYLVFLGPPGAGKGTQSKRIQEKTGIPHISTGDIFRDIVKKENDELGKKIKEIMEKGELVPDELVNEVVKRRLSEKDCEKGFILDGYPRTVAQAEFLDSFLESQNKQLTAAVLFKVPEDVVVQRLTSRLICPKCGRIYNMISLPPKEDELCDDCKVKLVQRDDDKEETVRHRLKVYNEKTQPVIDYYGKKGILKRVDGSQGIDNVVAEVLKIIGWSDK

SEQ ID NO: 317 - DNA, 693 bp, synthetic construct
  misc_feature 1..693: note = Variant of adenylate kinase
  source 1..693: mol_type = other DNA
atgcaccatcatcaccatcacgggggctccggcatgatggcatatctggtgttcttaggtccgccgggcgcgggaaaaggtacccaatcgaaacgcattcaggaaaagactggcatcccacatattagcacgggcgatatcttccgtgacatcgtcaagaaagagaacgatgaactgggcaagaagattaaagaaatcatggagaaaggtgaactcgttccagatgaactggtgaatgaggtagtaaaacgccgcctgtcggagaaagactgcgaaaaaggctttattttggatggttatccgcgtaccgttgctcaagcggaattcctggacagttttcttgaatcccagaacaaacagttgacagccgccgtgctgttcaaagtccccgaagatgttgttgtgcaacgtttaacctctcgcctgatctgtccgaaatgcgggcgtatctacaatatgatttcactgccaccaaaagaagacgagctgtgtgacgattgcaaagtcaaattagtacagcgtgatgatgataaggaagaaacggttcgtcaccgcctgaaagtctaccttgagaagacccagccggtcattgactattatggcatgaaaggtattctcaaacgcgtagatgggtcgcaaggaatcgacaacgttgttgcagaagtcctgaagattattggttggagcgataag

SEQ ID NO: 318 - protein, 231 aa, synthetic construct
  REGION 1..231: note = Variant of adenylate kinase
MHHHHHHGGSGMMAYLVFLGPPGAGKGTQSKRIQEKTGIPHISTGDIFRDIVKKENDELGKKIKEIMEKGELVPDELVNEVVKRRLSEKDCEKGFILDGYPRTVAQAEFLDSFLESQNKQLTAAVLFKVPEDVVVQRLTSRLICPKCGRIYNMISLPPKEDELCDDCKVKLVQRDDDKEETVRHRLKVYLEKTQPVIDYYGMKGILKRVDGSQGIDNVVAEVLKIIGWSDK

SEQ ID NO: 319 - DNA, 693 bp, synthetic construct
  misc_feature 1..693: note = Variant of adenylate kinase
  source 1..693: mol_type = other DNA
atgcaccatcatcaccatcacgggggctccggcatgatggcatatctggtgttcttaggtccgccgggcgcgggaaaaggtacccaatcgaaacgcattcaggaaaagactggcatcccacatattagcacgggcgatatcttccgtgacatcgtcaagaaaagtaacgatgaactgggcaagaagattaaagaaatcatggagaaaggtgaactcgttccagatgaactggtgaatgaggtagtaaaacgccgcctgtcggagaaagactgcgaaaaaggctttattttggatggttatccgcgtaccgttgctcaagcggaattcctggacagttttcttgaatcccagaacaaacagttgacagccgccgtgctgttcaaagtccccgaagatgttgttgtgcaacgtttaacctctcgcctgatctgtccgaaatgcgggcgtatctacaatatgatttcactgccaccaaaagaagacgagctgtgtgacgattgcaaagtcaaattagtacagcgtgatgatgataaggaagaaacggttcgtcaccgcctgaaagtctaccttgagaagacccagccggtcattgactattatggcaagaaaggtattctcaaacgcgtagatgggtcgcaaggaatcgacaacgttgttgcagaagtcctgaagattattggttggagcgataag

SEQ ID NO: 320 - protein, 231 aa, synthetic construct
  REGION 1..231: note = Variant of adenylate kinase
MHHHHHHGGSGMMAYLVFLGPPGAGKGTQSKRIQEKTGIPHISTGDIFRDIVKKSNDELGKKIKEIMEKGELVPDELVNEVVKRRLSEKDCEKGFILDGYPRTVAQAEFLDSFLESQNKQLTAAVLFKVPEDVVVQRLTSRLICPKCGRIYNMISLPPKEDELCDDCKVKLVQRDDDKEETVRHRLKVYLEKTQPVIDYYGKKGILKRVDGSQGIDNVVAEVLKIIGWSDK

SEQ ID NO: 321 - DNA, 693 bp, synthetic construct
  misc_feature 1..693: note = Variant of adenylate kinase
  source 1..693: mol_type = other DNA
atgcaccatcatcaccatcacgggggctccggcatgatggcatatctggtgttcttaggtccgccgggcgcgggaaaaggtacccaatcgaaacgcattcaggaaaagactggcatcccacatattagcacgggcgatatcttccgtgacctggtcaagaaagagaacgatgaactgggcaagaagattaaagaaatcatggagaaaggtgaactcgttccagatgaactggtgaatgaggtagtaaaacgccgcctgtcggagaaagactgcgaaaaaggctttattttggatggttatccgcgtaccgttgctcaagcggaattcctggacagttttcttgaatcccagaacaaacagttgacagccgccgtgctgttcaaagtccccgaagatgttgttgtgcaacgtttaacctctcgcctgatctgtccgaaatgcgggcgtatctacaatatgatttcactgccaccaaaagaagacgagctgtgtgacgattgcaaagtcaaattagtacagcgtgatgatgataaggaagaaacggttcgtcaccgcctgaaagtctaccttgagaagacccagccggtcattgactattatggcaagaaaggtattctcaaacgcgtagatgggtcgcaaggaatcgacaacgttgttgcagaagtcctgaagattattggttggagcgataag

SEQ ID NO: 322 - protein, 231 aa, synthetic construct
  REGION 1..231: note = Variant of adenylate kinase
MHHHHHHGGSGMMAYLVFLGPPGAGKGTQSKRIQEKTGIPHISTGDIFRDLVKKENDELGKKIKEIMEKGELVPDELVNEVVKRRLSEKDCEKGFILDGYPRTVAQAEFLDSFLESQNKQLTAAVLFKVPEDVVVQRLTSRLICPKCGRIYNMISLPPKEDELCDDCKVKLVQRDDDKEETVRHRLKVYLEKTQPVIDYYGKKGILKRVDGSQGIDNVVAEVLKIIGWSDK

SEQ ID NO: 323 - DNA, 693 bp, synthetic construct
  misc_feature 1..693: note = Variant of adenylate kinase
  source 1..693: mol_type = other DNA
atgcaccatcatcaccatcacgggggctccggcatgatggcatatctggtgttcttaggtccgccgggcgcgggaaaaggtacccaatcgaaacgcattcaggaaaagactggcatcccacatattagcacgggcgatatcttccgtgacatcgtcaagaaagagaacgatgaactgggcaagaagattaaagaaatcatggagaaaggtgaactcgttccagatgaactggtgaatgaggtagtaaaacgccgcctgtcggagaaagactgcgaaaaaggctttattttggatggttatccgcgtaccgttgctcaagcggaattcctggaccagtttcttgaatcccagaacaaacagttgacagccgccgtgctgttcaaagtccccgaagatgttgttgtgcaacgtttaacctctcgcctgatctgtccgaaatgcgggcgtatctacaatatgatttcactgccaccaaaagaagacgagctgtgtgacgattgcaaagtcaaattagtacagcgtgatgatgataaggaagaaacggttcgtcaccgcctgaaagtctaccttgagaagacccagccggtcattgactattatggcaagaaaggtattctcaaacgcgtagatgggtcgcaaggaatcgacaacgttgttgcagaagtcctgaagattattggttggagcgataag

SEQ ID NO: 324 - protein, 231 aa, synthetic construct
  REGION 1..231: note = Variant of adenylate kinase
MHHHHHHGGSGMMAYLVFLGPPGAGKGTQSKRIQEKTGIPHISTGDIFRDIVKKENDELGKKIKEIMEKGELVPDELVNEVVKRRLSEKDCEKGFILDGYPRTVAQAEFLDQFLESQNKQLTAAVLFKVPEDVVVQRLTSRLICPKCGRIYNMISLPPKEDELCDDCKVKLVQRDDDKEETVRHRLKVYLEKTQPVIDYYGKKGILKRVDGSQGIDNVVAEVLKIIGWSDK

SEQ ID NO: 325 - DNA, 693 bp, synthetic construct
  misc_feature 1..693: note = Variant of adenylate kinase
  source 1..693: mol_type = other DNA
atgcaccatcatcaccatcacgggggctccggcatgatggcatatctggtgttcttaggtccgccgggcgcgggaaaaggtacccaatcgaaacgcattcaggaaaagactggcatcccacatattagcacgggcgatatcttccgtgacatcgtcaagaaagagaacgatgaactgggcaagaagattaaagaaatcatggagaaaggtgaactcgttccagatgaactggtgaatgaggtagtaaaacgccgcctgtcggagaaagactgcgaaaaaacttttattttggatggttatccgcgtaccgttgctcaagcggaattcctggacagttttcttgaatcccagaacaaacagttgacagccgccgtgctgttcaaagtccccgaagatgttgttgtgcaacgtttaacctctcgcctgatctgtccgaaatgcgggcgtatctacaatatgatttcactgccaccaaaagaagacgagctgtgtgacgattgcaaagtcaaattagtacagcgtgatgatgataaggaagaaacggttcgtcaccgcctgaaagtctaccttgagaagacccagccggtcattgactattatggcaagaaaggtattctcaaacgcgtagatgggtcgcaaggaatcgacaacgttgttgcagaagtcctgaagattattggttggagcgataag

SEQ ID NO: 326 - protein, 231 aa, synthetic construct
  REGION 1..231: note = Variant of adenylate kinase
MHHHHHHGGSGMMAYLVFLGPPGAGKGTQSKRIQEKTGIPHISTGDIFRDIVKKENDELGKKIKEIMEKGELVPDELVNEVVKRRLSEKDCEKTFILDGYPRTVAQAEFLDSFLESQNKQLTAAVLFKVPEDVVVQRLTSRLICPKCGRIYNMISLPPKEDELCDDCKVKLVQRDDDKEETVRHRLKVYLEKTQPVIDYYGKKGILKRVDGSQGIDNVVAEVLKIIGWSDK

SEQ ID NO: 327 - DNA, 693 bp, synthetic construct
  misc_feature 1..693: note = Variant of adenylate kinase
  source 1..693: mol_type = other DNA
atgcaccatcatcaccatcacgggggctccggcatgatggcatatctggtgttcttaggtccgccgggcgcgggaaaaggtacccaatcgaaacgcattcaggaaaagactggcatcccacatattagcacgggcgatatcttccgtgacatcgtcaagaaagagaacgatgaactgggcaagaagattaaagaagcgatggagaaaggtgaactcgttccagatgaactggtgaatgaggtagtaaaacgccgcctgtcggagaaagactgcgaaaaaggctttattttggatggttatccgcgtaccgttgctcaagcggaattcctggacagttttcttgaatcccagaacaaacagttgacagccgccgtgctgttcaaagtccccgaagatgttgttgtgcaacgtttaacctctcgcctgatctgtccgaaatgcgggcgtatctacaatatgatttcactgccaccaaaagaagacgagctgtgtgacgattgcaaagtcaaattagtacagcgtgatgatgataaggaagaaacggttcgtcaccgcctgaaagtctaccttgagaagacccagccggtcattgactattatggcaagaaaggtattctcaaacgcgtagatgggtcgcaaggaatcgacaacgttgttgcagaagtcctgaagattattggttggagcgataag

SEQ ID NO: 328 - protein, 231 aa, synthetic construct
  REGION 1..231: note = Variant of adenylate kinase
MHHHHHHGGSGMMAYLVFLGPPGAGKGTQSKRIQEKTGIPHISTGDIFRDIVKKENDELGKKIKEAMEKGELVPDELVNEVVKRRLSEKDCEKGFILDGYPRTVAQAEFLDSFLESQNKQLTAAVLFKVPEDVVVQRLTSRLICPKCGRIYNMISLPPKEDELCDDCKVKLVQRDDDKEETVRHRLKVYLEKTQPVIDYYGKKGILKRVDGSQGIDNVVAEVLKIIGWSDK

SEQ ID NO: 329 - DNA, 693 bp, synthetic construct
  misc_feature 1..693: note = Variant of adenylate kinase
  source 1..693: mol_type = other DNA
atgcaccatcatcaccatcacgggggctccggcatgatggcatatctggtgttcttaggtccgccgggcgcgggaaaaggtacccaatcgaaacgcattcaggaaaagactggcatcccacatattagcacgggcgatatcttccgtgacatcgtcaagaaagagaacgatgaactgggcaagaagattaaagaaatcatggagaaaggtgaactcgttccagatgaactggtgaatgaggtagtaaaacgccgcctgtcggagaaagactgcgaaaaaggctttattttggatggttatccgcgtaccgttgctcaagcggaattcctggacagttttcttgaatcccagaacaaacagttgacagccgccgtgctgttcaaagtccccgaagatgttgttgtgcaacgtttaacctctcgcctgatctgtccgaaatgcgggcgtatctacaatatgatttcactgccaccaaaagaagacgagctgtgtgacgattgcaaagtcaaattagtacagcgtgatgatgataaggaagaaacggttcgtcaccgcctgaaagtctaccttgagaagacccagccggtcattgactattatgctaagaaaggtattctcaaacgcgtagatgggtcgcaaggaatcgacaacgttgttgcagaagtcctgaagattattggttggagcgataag

SEQ ID NO: 330 - protein, 231 aa, synthetic construct
  REGION 1..231: note = Variant of adenylate kinase
MHHHHHHGGSGMMAYLVFLGPPGAGKGTQSKRIQEKTGIPHISTGDIFRDIVKKENDELGKKIKEIMEKGELVPDELVNEVVKRRLSEKDCEKGFILDGYPRTVAQAEFLDSFLESQNKQLTAAVLFKVPEDVVVQRLTSRLICPKCGRIYNMISLPPKEDELCDDCKVKLVQRDDDKEETVRHRLKVYLEKTQPVIDYYAKKGILKRVDGSQGIDNVVAEVLKIIGWSDK

SEQ ID NO: 331 - DNA, 693 bp, synthetic construct
  misc_feature 1..693: note = Variant of adenylate kinase
  source 1..693: mol_type = other DNA
atgcaccatcatcaccatcacgggggctccggcatgatggcatatctggtgttcttaggtccgccgggcgcgggaaaaggtacccaatcgaaacgcattcaggaaaagactggcatcccacatattagcacgggcgatatcttccgtgacatcgtcaagaaagagaacgatgaactgggcaagaagattaaagaaatcatggagaaaggtgaactcgttccagatgaactggtgaatgaggtagtaaaacgccgcctgtcggagaaagactgcgaaaaaggctttattttggatggttatccgcgtaccgttgctcaagcggaattcctggacagttttcttgaatcccagaacaaacagttgacagccgccgtgctgttcaaagtccccgaagatgttgttgtgcaacgtttaacctctcgcctgatctgtccgaaatgcgggcgtatctacaatatgatttcactgccaccaaaagaagacgagctgtgtgacgattgcaaagtcaaattagtacagcgtgatgatgataaggaagaaacggttcgtcaccgcctgaaagtctaccttgagaagacccagccggtcattgactattataagaagaaaggtattctcaaacgcgtagatgggtcgcaaggaatcgacaacgttgttgcagaagtcctgaagattattggttggagcgataag

SEQ ID NO: 332 - protein, 231 aa, synthetic construct
  REGION 1..231: note = Variant of adenylate kinase
MHHHHHHGGSGMMAYLVFLGPPGAGKGTQSKRIQEKTGIPHISTGDIFRDIVKKENDELGKKIKEIMEKGELVPDELVNEVVKRRLSEKDCEKGFILDGYPRTVAQAEFLDSFLESQNKQLTAAVLFKVPEDVVVQRLTSRLICPKCGRIYNMISLPPKEDELCDDCKVKLVQRDDDKEETVRHRLKVYLEKTQPVIDYYKKKGILKRVDGSQGIDNVVAEVLKIIGWSDK

SEQ ID NO: 333 - DNA, 693 bp, synthetic construct
  misc_feature 1..693: note = Variant of adenylate kinase
  source 1..693: mol_type = other DNA
atgcaccatcatcaccatcacgggggctccggcatgatggcatatctggtgttcttaggtccgccgggcgcgggaaaaggtacccaatcgaaacgcattcaggaaaagactggcatcccacatattagcacgggcgatatcttccgtgacatcgtcaagaaagagaacgatgaactgggcaagaagattaaagaaatcatggagaaaggtgaactcgttccagatgaactggtgaatgaggtagtaaaacgccgcctgtcggagaaagactgcgaaaaaggctttattttggatggttatccgcgtaccgttgctcaagcggaattcctggacagttttcttgaatcccagaacaaacagttgacagccgccgtgctgttcaaagtccccgaagatgttgttgtgcaacgtttaacctctcgcctgatctgtccgaaatgcgggcgtatctacaatatgatttcactgccaccaaaagaagacgagctgtgtgacgattgcaaagtcaaattagtacagcgtgatgatgataaggaagaaacggttcgtcaccgcctgaaagtctaccttgagaagacccagccggtcattgactattatttgaagaaaggtattctcaaacgcgtagatgggtcgcaaggaatcgacaacgttgttgcagaagtcctgaagattattggttggagcgataag

SEQ ID NO: 334 - protein, 231 aa, synthetic construct
  REGION 1..231: note = Variant of adenylate kinase
MHHHHHHGGSGMMAYLVFLGPPGAGKGTQSKRIQEKTGIPHISTGDIFRDIVKKENDELGKKIKEIMEKGELVPDELVNEVVKRRLSEKDCEKGFILDGYPRTVAQAEFLDSFLESQNKQLTAAVLFKVPEDVVVQRLTSRLICPKCGRIYNMISLPPKEDELCDDCKVKLVQRDDDKEETVRHRLKVYLEKTQPVIDYYLKKGILKRVDGSQGIDNVVAEVLKIIGWSDK

SEQ ID NO: 335 - DNA, 693 bp, synthetic construct
  misc_feature 1..693: note = Variant of adenylate kinase
  source 1..693: mol_type = other DNA
atgcaccatcatcaccatcacgggggctccggcatgatggcatatctggtgttcttaggtccgccgggcgcgggaaaaggtacccaatcgaaacgcattcaggaaaagactggcatcccacatattagcacgggcgatatcttccgtgacatcgtcaagaaagagaacgatgaactgggcaagaagattaaagaacggatggagaaaggtgaactcgttccagatgaactggtgaatgaggtagtaaaacgccgcctgtcggagaaagactgcgaaaaaggctttattttggatggttatccgcgtaccgttgctcaagcggaattcctggacagttttcttgaatcccagaacaaacagttgacagccgccgtgctgttcaaagtccccgaagatgttgttgtgcaacgtttaacctctcgcctgatctgtccgaaatgcgggcgtatctacaatatgatttcactgccaccaaaagaagacgagctgtgtgacgattgcaaagtcaaattagtacagcgtgatgatgataaggaagaaacggttcgtcaccgcctgaaagtctaccttgagaagacccagccggtcattgactattatggcaagaaaggtattctcaaacgcgtagatgggtcgcaaggaatcgacaacgttgttgcagaagtcctgaagattattggttggagcgataag

SEQ ID NO: 336 - protein, 231 aa, synthetic construct
  REGION 1..231: note = Variant of adenylate kinase
MHHHHHHGGSGMMAYLVFLGPPGAGKGTQSKRIQEKTGIPHISTGDIFRDIVKKENDELGKKIKERMEKGELVPDELVNEVVKRRLSEKDCEKGFILDGYPRTVAQAEFLDSFLESQNKQLTAAVLFKVPEDVVVQRLTSRLICPKCGRIYNMISLPPKEDELCDDCKVKLVQRDDDKEETVRHRLKVYLEKTQPVIDYYGKKGILKRVDGSQGIDNVVAEVLKIIGWSDK

SEQ ID NO: 337 - DNA, 693 bp, synthetic construct
  misc_feature 1..693: note = Variant of adenylate kinase
  source 1..693: mol_type = other DNA
atgcaccatcatcaccatcacgggggctccggcatgatggcatatctggtgttcttaggtccgccgggcgcgggaaaaggtacccaatcgaaacgcattcaggaaaagactggcatcccacatattagcacgggcgatatcttccgtgacatcgtcaagaaagagaacgatgaactgggcaagaagattaaagaaatcatggagaaaggtgaactcgttccagatgaactggtgaatgaggtagtaaaacgccgcctgtcggagaaagactgcgaaaaaggctttattttggatggttatccgcgtaccgttgctcaagcggaattcctggacagttttcttgaatcccagaacaaacagttgacagccgccgtgctgttcaatgtccccgaagatgttgttgtgcaacgtttaacctctcgcctgatctgtccgaaatgcgggcgtatctacaatatgatttcactgccaccaaaagaagacgagctgtgtgacgattgcaaagtcaaattagtacagcgtgatgatgataaggaagaaacggttcgtcaccgcctgaaagtctaccttgagaagacccagccggtcattgactattatggcaagaaaggtattctcaaacgcgtagatgggtcgcaaggaatcgacaacgttgttgcagaagtcctgaagattattggttggagcgataag

SEQ ID NO: 338 - protein, 231 aa, synthetic construct
  REGION 1..231: note = Variant of adenylate kinase
MHHHHHHGGSGMMAYLVFLGPPGAGKGTQSKRIQEKTGIPHISTGDIFRDIVKKENDELGKKIKEIMEKGELVPDELVNEVVKRRLSEKDCEKGFILDGYPRTVAQAEFLDSFLESQNKQLTAAVLFNVPEDVVVQRLTSRLICPKCGRIYNMISLPPKEDELCDDCKVKLVQRDDDKEETVRHRLKVYLEKTQPVIDYYGKKGILKRVDGSQGIDNVVAEVLKIIGWSDK

SEQ ID NO: 339 - DNA, 693 bp, synthetic construct
  misc_feature 1..693: note = Variant of adenylate kinase
  source 1..693: mol_type = other DNA
atgcaccatcatcaccatcacgggggctccggcatgatggcatatctggtgttcttaggtccgccgggcgcgggaaaaggtacccaatcgaaacgcattcaggaaaagactggcatcccacatattagcacgggcgatatcttccgtgacatcgtcaagaaagagaacgatgaactgggcaagaagattaaagaaatcatggagaaaggtgaactcgttccagatgaactggtgaatgaggtagtaaaacgccgcctgtcggagaaagactgcgaaaaaggctttattttggatggttatccgcgtaccgttgctcaagcggaattcctggacagttttcttgaatcccagaacaaacagttgacagccgccgtgctgttcaaagtccccgaagatgttgttgtgcaacgtttaacctctcgcctgatctgtccgaaatgcgggcgtatctacaatatgatttcactgccaccaaaagaagacgagctgtgtgacgattgcaaagtcaaattagtacagcgtgatgatgataaggaagaaacggttcgtcaccgcctgaaagtctaccttgagaagacccagccggtcattgactattatggcaagaaaggtattctcaaacgcgtagatgggtcgcaactgatcgacaacgttgttgcagaagtcctgaagattattggttggagcgataag

SEQ ID NO: 340 - protein, 231 aa, synthetic construct
  REGION 1..231: note = Variant of adenylate kinase
MHHHHHHGGSGMMAYLVFLGPPGAGKGTQSKRIQEKTGIPHISTGDIFRDIVKKENDELGKKIKEIMEKGELVPDELVNEVVKRRLSEKDCEKGFILDGYPRTVAQAEFLDSFLESQNKQLTAAVLFKVPEDVVVQRLTSRLICPKCGRIYNMISLPPKEDELCDDCKVKLVQRDDDKEETVRHRLKVYLEKTQPVIDYYGKKGILKRVDGSQLIDNVVAEVLKIIGWSDK

SEQ ID NO: 341 - DNA, 693 bp, synthetic construct
  misc_feature 1..693: note = Variant of adenylate kinase
  source 1..693: mol_type = other DNA
atgcaccatcatcaccatcacgggggctccggcatgatggcatatctggtgttcttaggtccgccgggcgcgggaaaaggtacccaatcgaaacgcattcaggaaaagactggcatcccacatattagcacgggcgatatcttccgtgacatcgtcaagaaagagaacgatgaactgggcaagaagattaaagaaatcatggagaaaggtgaactcgttccagatgaactggtgaatgaggtagtaaaacgccgcctgtcggagaaagactgcgaaaaaggctttattttggatggttatccgcgtaccgttgctcaagcggaattcctggacagttttcttgaatcccagaacaaacagttgacagccgccgtgagtttcaaagtccccgaagatgttgttgtgcaacgtttaacctctcgcctgatctgtccgaaatgcgggcgtatctacaatatgatttcactgccaccaaaagaagacgagctgtgtgacgattgcaaagtcaaattagtacagcgtgatgatgataaggaagaaacggttcgtcaccgcctgaaagtctaccttgagaagacccagccggtcattgactattatggcaagaaaggtattctcaaacgcgtagatgggtcgcaaggaatcgacaacgttgttgcagaagtcctgaagattattggttggagcgataag

SEQ ID NO: 342 - protein, 231 aa, synthetic construct
  REGION 1..231: note = Variant of adenylate kinase
MHHHHHHGGSGMMAYLVFLGPPGAGKGTQSKRIQEKTGIPHISTGDIFRDIVKKENDELGKKIKEIMEKGELVPDELVNEVVKRRLSEKDCEKGFILDGYPRTVAQAEFLDSFLESQNKQLTAAVSFKVPEDVVVQRLTSRLICPKCGRIYNMISLPPKEDELCDDCKVKLVQRDDDKEETVRHRLKVYLEKTQPVIDYYGKKGILKRVDGSQGIDNVVAEVLKIIGWSDK

SEQ ID NO: 343 - DNA, 693 bp, synthetic construct
  misc_feature 1..693: note = Variant of adenylate kinase
  source 1..693: mol_type = other DNA
atgcaccatcatcaccatcacgggggctccggcatgatggcatatctggtgttcttaggtccgccgggcgcgggaaaaggtacccaatcgaaacgcattcaggaaaagactggcatcccacatattagcacgggcgatatcttccgtgacatcgtcaagaaagaggaggatgaactgggcaagaagattaaagaaatcatggagaaaggtgaactcgttccagatgaactggtgaatgaggtagtaaaacgccgcctgtcggagaaagactgcgaaaaaggctttattttggatggttatccgcgtaccgttgctcaagcggaattcctggacagttttcttgaatcccagaacaaacagttgacagccgccgtgctgttcaaagtccccgaagatgttgttgtgcaacgtttaacctctcgcctgatctgtccgaaatgcgggcgtatctacaatatgatttcactgccaccaaaagaagacgagctgtgtgacgattgcaaagtcaaattagtacagcgtgatgatgataaggaagaaacggttcgtcaccgcctgaaagtctaccttgagaagacccagccggtcattgactattatggcaagaaaggtattctcaaacgcgtagatgggtcgcaaggaatcgacaacgttgttgcagaagtcctgaagattattggttggagcgataag

SEQ ID NO: 344 - protein, 231 aa, synthetic construct
  REGION 1..231: note = Variant of adenylate kinase
MHHHHHHGGSGMMAYLVFLGPPGAGKGTQSKRIQEKTGIPHISTGDIFRDIVKKEEDELGKKIKEIMEKGELVPDELVNEVVKRRLSEKDCEKGFILDGYPRTVAQAEFLDSFLESQNKQLTAAVLFKVPEDVVVQRLTSRLICPKCGRIYNMISLPPKEDELCDDCKVKLVQRDDDKEETVRHRLKVYLEKTQPVIDYYGKKGILKRVDGSQGIDNVVAEVLKIIGWSDK

SEQ ID NO: 345 - DNA, 693 bp, synthetic construct
  misc_feature 1..693: note = Variant of adenylate kinase
  source 1..693: mol_type = other DNA
atgcaccatcatcaccatcacgggggctccggcatgatggcatatctggtgttcttaggtccgccgggcgcgggaaaaggtacccaatcgaaacgcattcaggaaaagactggcatcccacatattagcacgggcgatatcttccgtgacatcgtcaagaaagagaacgatgaactgggcaagaagattaaagaaatcatggagaaaggtgaactcgttccagatgaactggtgaatgaggtagtaaaacgccgcctgtcggagaaagactgcgaaaaaggctttattttggatggttatccgcgtaccgttgctcaagcggaattcctggacagttttcttgaatcccagaacaaacagttgacagccgccgtgctgttcaaagtccccgaagatgttgttgtgcaacgtttaacctctcgcctgatctgtccgaaatgcgggcgtatctacaatatgatttcactgccaccaaaagaagacgagctgtgtgacgattgcaaagtcaaattagtacagcgtgatgatgataagattgaaacggttcgtcaccgcctgaaagtctaccttgagaagacccagccggtcattgactattatggcaagaaaggtattctcaaacgcgtagatgggtcgcaaggaatcgacaacgttgttgcagaagtcctgaagattattggttggagcgataag

SEQ ID NO: 346 - protein, 231 aa, synthetic construct
  REGION 1..231: note = Variant of adenylate kinase
MHHHHHHGGSGMMAYLVFLGPPGAGKGTQSKRIQEKTGIPHISTGDIFRDIVKKENDELGKKIKEIMEKGELVPDELVNEVVKRRLSEKDCEKGFILDGYPRTVAQAEFLDSFLESQNKQLTAAVLFKVPEDVVVQRLTSRLICPKCGRIYNMISLPPKEDELCDDCKVKLVQRDDDKIETVRHRLKVYLEKTQPVIDYYGKKGILKRVDGSQGIDNVVAEVLKIIGWSDK

SEQ ID NO: 347 - DNA, 693 bp, synthetic construct
  misc_feature 1..693: note = Variant of adenylate kinase
  source 1..693: mol_type = other DNA
atgcaccatcatcaccatcacgggggctccggcatgatggcatatctggtgttcttaggtccgccgggcgcgggaaaaggtacccaatcgaaacgcattcaggaaaagactggcatcccacatattagcacgggcgatatcttccgtgacatcgtcaagaaagagaacgatgaactgggcaagaagattaaagaaatcatggagaaaggtgaactcgttccagatgaactggtgaatgaggtagtaaaacgccgcctgtcggagaaagactgcgaaaaaggctttattttggatggttatccgcgtaccgttgctcaagcggaattcctggacagttttcttgaatcccagaacaaacagttgacagccgccgtgctgttcaaagtccccgaagatgttgttgtgcaacgtttaacctctcgcctgatctgtccgaaatgcgggcgtatctacaatatgatttcactgccaccaaaagaagacgagctgtgtgacgattgcaaagtcaaattagtacagcgtgatgatgataaggaagaaacggttcgtcaccgcctgaaagtctaccttgagaagacccagccggtcattgactattatggcaagaaaggtattctcaaacgcgtagatgggtcgcaaggaatctcgaacgttgttgcagaagtcctgaagattattggttggagcgataag

SEQ ID NO: 348 - protein, 231 aa, synthetic construct
  REGION 1..231: note = Variant of adenylate kinase
MHHHHHHGGSGMMAYLVFLGPPGAGKGTQSKRIQEKTGIPHISTGDIFRDIVKKENDELGKKIKEIMEKGELVPDELVNEVVKRRLSEKDCEKGFILDGYPRTVAQAEFLDSFLESQNKQLTAAVLFKVPEDVVVQRLTSRLICPKCGRIYNMISLPPKEDELCDDCKVKLVQRDDDKEETVRHRLKVYLEKTQPVIDYYGKKGILKRVDGSQGISNVVAEVLKIIGWSDK

SEQ ID NO: 349 - DNA, 693 bp, synthetic construct
  misc_feature 1..693: note = Variant of adenylate kinase
  source 1..693: mol_type = other DNA
atgcaccatcatcaccatcacgggggctccggcatgatggcatatctggtgttcttaggtccgccgggcgcgggaaaaggtacccaatcgaaacgcattcaggaaaagactggcatcccacatattagcacgggcgatatcttccgtgacatcgtcaagaaagagaacgatgaactgggcaagaagattaaagaaatcatggagaaaggtgaactcgttccagatcctctggtgaatgaggtagtaaaacgccgcctgtcggagaaagactgcgaaaaaggctttattttggatggttatccgcgtaccgttgctcaagcggaattcctggacagttttcttgaatcccagaacaaacagttgacagccgccgtgctgttcaaagtccccgaagatgttgttgtgcaacgtttaacctctcgcctgatctgtccgaaatgcgggcgtatctacaatatgatttcactgccaccaaaagaagacgagctgtgtgacgattgcaaagtcaaattagtacagcgtgatgatgataaggaagaaacggttcgtcaccgcctgaaagtctaccttgagaagacccagccggtcattgactattatggcaagaaaggtattctcaaacgcgtagatgggtcgcaaggaatcgacaacgttgttgcagaagtcctgaagattattggttggagcgataag

SEQ ID NO: 350 - protein, 231 aa, synthetic construct
  REGION 1..231: note = Variant of adenylate kinase
MHHHHHHGGSGMMAYLVFLGPPGAGKGTQSKRIQEKTGIPHISTGDIFRDIVKKENDELGKKIKEIMEKGELVPDPLVNEVVKRRLSEKDCEKGFILDGYPRTVAQAEFLDSFLESQNKQLTAAVLFKVPEDVVVQRLTSRLICPKCGRIYNMISLPPKEDELCDDCKVKLVQRDDDKEETVRHRLKVYLEKTQPVIDYYGKKGILKRVDGSQGIDNVVAEVLKIIGWSDK

SEQ ID NO: 351 - DNA, 693 bp, synthetic construct
  misc_feature 1..693: note = Variant of adenylate kinase
  source 1..693: mol_type = other DNA
atgcaccatcatcaccatcacgggggctccggcatgatggcatatctggtgttcttaggtccgccgggcgcgggaaaaggtacccaatcgaaacgcattcaggaaaagactggcatcccacatattagcacgggcgatatcttccgtgacatcgtcaagaaagagaacgatgaactgggcaagaagattaaagaaatcatggagtatggtgaactcgttccagatgaactggtgaatgaggtagtaaaacgccgcctgtcggagaaagactgcgaaaaaggctttattttggatggttatccgcgtaccgttgctcaagcggaattcctggacagttttcttgaatcccagaacaaacagttgacagccgccgtgctgttcaaagtccccgaagatgttgttgtgcaacgtttaacctctcgcctgatctgtccgaaatgcgggcgtatctacaatatgatttcactgccaccaaaagaagacgagctgtgtgacgattgcaaagtcaaattagtacagcgtgatgatgataaggaagaaacggttcgtcaccgcctgaaagtctaccttgagaagacccagccggtcattgactattatggcaagaaaggtattctcaaacgcgtagatgggtcgcaaggaatcgacaacgttgttgcagaagtcctgaagattattggttggagcgataag

SEQ ID NO: 352 - protein, 231 aa, synthetic construct
  REGION 1..231: note = Variant of adenylate kinase
MHHHHHHGGSGMMAYLVFLGPPGAGKGTQSKRIQEKTGIPHISTGDIFRDIVKKENDELGKKIKEIMEYGELVPDELVNEVVKRRLSEKDCEKGFILDGYPRTVAQAEFLDSFLESQNKQLTAAVLFKVPEDVVVQRLTSRLICPKCGRIYNMISLPPKEDELCDDCKVKLVQRDDDKEETVRHRLKVYLEKTQPVIDYYGKKGILKRVDGSQGIDNVVAEVLKIIGWSDK

SEQ ID NO: 353 - DNA, 693 bp, synthetic construct
  misc_feature 1..693: note = Variant of adenylate kinase
  source 1..693: mol_type = other DNA
atgcaccatcatcaccatcacgggggctccggcatgatggcatatctggtgttcttaggtccgccgggcgcgggaaaaggtacccaatcgaaacgcattcaggaaaagactggcatcccacatattagcacgggcgatatcttccgtgacatcgtcaagaaagagaacgatgaactgggcaagaagattaaagaaatcatggagaaaggtgaactcgttccagatgaactggtgaatgaggtagtaaaacgccgcctgtcggagaaagactgcgaaaaaggctttattttggatggttatccgcgtaccgttgctcaagcggaattcctggacagttttcttgggtcccagaacaaacagttgacagccgccgtgctgttcaaagtccccgaagatgttgttgtgcaacgtttaacctctcgcctgatctgtccgaaatgcgggcgtatctacaatatgatttcactgccaccaaaagaagacgagctgtgtgacgattgcaaagtcaaattagtacagcgtgatgatgataaggaagaaacggttcgtcaccgcctgaaagtctaccttgagaagacccagccggtcattgactattatggcaagaaaggtattctcaaacgcgtagatgggtcgcaaggaatcgacaacgttgttgcagaagtcctgaagattattggttggagcgataag

SEQ ID NO: 354 - protein, 231 aa, synthetic construct
  REGION 1..231: note = Variant of adenylate kinase
MHHHHHHGGSGMMAYLVFLGPPGAGKGTQSKRIQEKTGIPHISTGDIFRDIVKKENDELGKKIKEIMEKGELVPDELVNEVVKRRLSEKDCEKGFILDGYPRTVAQAEFLDSFLGSQNKQLTAAVLFKVPEDVVVQRLTSRLICPKCGRIYNMISLPPKEDELCDDCKVKLVQRDDDKEETVRHRLKVYLEKTQPVIDYYGKKGILKRVDGSQGIDNVVAEVLKIIGWSDK

SEQ ID NO: 355 - DNA, 693 bp, synthetic construct
  misc_feature 1..693: note = Variant of adenylate kinase
  source 1..693: mol_type = other DNA
atgcaccatcatcaccatcacgggggctccggcatgatggcatatctggtgttcttaggtccgccgggcgcgggaaaaggtacccaatcgaaacgcattcaggaaaagactggcatcccacatattagcacgggcgatatcttccgtgacatcgtcaagaaagagaacgatgaactgggcaagaagattaaagaaatcatggagaaaggtgaactcgttccagatgaactggtgaatgaggtagtaaaacgccgcctgtcggagaaagactgcgaaaaaggctttattttggatggttatccgcgtaccgttgctcaagcggaattcctggacagttttcttgaatcccagaacaaacagttgacagccgccgtgctgttcaaagtccccgaagatgttgttgtgcaacgtttaacctctcgcctgatctgtccgaaatgcgggcgtatctacaatatgatttcactgccaccaaaagaagacgagctgtgtgactgttgcaaagtcaaattagtacagcgtgatgatgataaggaagaaacggttcgtcaccgcctgaaagtctaccttgagaagacccagccggtcattgactattatggcaagaaaggtattctcaaacgcgtagatgggtcgcaaggaatcgacaacgttgttgcagaagtcctgaagattattggttggagcgataag

SEQ ID NO: 356 - protein, 231 aa, synthetic construct
  REGION 1..231: note = Variant of adenylate kinase
MHHHHHHGGSGMMAYLVFLGPPGAGKGTQSKRIQEKTGIPHISTGDIFRDIVKKENDELGKKIKEIMEKGELVPDELVNEVVKRRLSEKDCEKGFILDGYPRTVAQAEFLDSFLESQNKQLTAAVLFKVPEDVVVQRLTSRLICPKCGRIYNMISLPPKEDELCDCCKVKLVQRDDDKEETVRHRLKVYLEKTQPVIDYYGKKGILKRVDGSQGIDNVVAEVLKIIGWSDK

SEQ ID NO: 357 - DNA, 693 bp, synthetic construct
  misc_feature 1..693: note = Variant of adenylate kinase
  source 1..693: mol_type = other DNA
atgcaccatcatcaccatcacgggggctccggcatgatggcatatctggtgttcttaggtccgccgggcgcgggaaaaggtacccaatcgaaacgcattcaggaaaagactggcatcccacatattagcacgggcgatatcttccgtgacatcgtcaagaaagagaacgatgaactgggcaagaagattaaagaaatcatggagaaaggtgaactcgttccagatgaactggtgaatgaggtagtaaaacgccgcctgtcggagaaagactgcgaaaaaggctttattttggatggttatccgcgtaccgttgctcaagcggaattcctggacagttttcttgaatcccagaacaaattgttgacagccgccgtgctgttcaaagtccccgaagatgttgttgtgcaacgtttaacctctcgcctgatctgtccgaaatgcgggcgtatctacaatatgatttcactgccaccaaaagaagacgagctgtgtgacgattgcaaagtcaaattagtacagcgtgatgatgataaggaagaaacggttcgtcaccgcctgaaagtctaccttgagaagacccagccggtcattgactattatggcaagaaaggtattctcaaacgcgtagatgggtcgcaaggaatcgacaacgttgttgcagaagtcctgaagattattggttggagcgataag

SEQ ID NO: 358 - protein, 231 aa, synthetic construct
  REGION 1..231: note = Variant of adenylate kinase
MHHHHHHGGSGMMAYLVFLGPPGAGKGTQSKRIQEKTGIPHISTGDIFRDIVKKENDELGKKIKEIMEKGELVPDELVNEVVKRRLSEKDCEKGFILDGYPRTVAQAEFLDSFLESQNKLLTAAVLFKVPEDVVVQRLTSRLICPKCGRIYNMISLPPKEDELCDDCKVKLVQRDDDKEETVRHRLKVYLEKTQPVIDYYGKKGILKRVDGSQGIDNVVAEVLKIIGWSDK

SEQ ID NO: 359 - DNA, 693 bp, synthetic construct
  misc_feature 1..693: note = Variant of adenylate kinase
  source 1..693: mol_type = other DNA
atgcaccatcatcaccatcacgggggctccggcatgatggcatatctggtgttcttaggtccgccgggcgcgggaaaaggtacccaatcgaaacgcattcaggaaaagactggcatcccacatattagcacgggcgatatcttccgtgacatcgtcaagaaagagaacgatgaactgggcaagaagattaaagaaatcatggagaaaggtgaactcgttccagatgaactggtgaatgaggtagtaaaacgccgcctgtcggagaaagactgcgaaaaaggctttattttggatggttatccgcgtaccgttgctcaagcggaattcctggacagttttcttgaattgcagaacaaacagttgacagccgccgtgctgttcaaagtccccgaagatgttgttgtgcaacgtttaacctctcgcctgatctgtccgaaatgcgggcgtatctacaatatgatttcactgccaccaaaagaagacgagctgtgtgacgattgcaaagtcaaattagtacagcgtgatgatgataaggaagaaacggttcgtcaccgcctgaaagtctaccttgagaagacccagccggtcattgactattatggcaagaaaggtattctcaaacgcgtagatgggtcgcaaggaatcgacaacgttgttgcagaagtcctgaagattattggttggagcgataag

SEQ ID NO: 360 - protein, 231 aa, synthetic construct
  REGION 1..231: note = Variant of adenylate kinase
MHHHHHHGGSGMMAYLVFLGPPGAGKGTQSKRIQEKTGIPHISTGDIFRDIVKKENDELGKKIKEIMEKGELVPDELVNEVVKRRLSEKDCEKGFILDGYPRTVAQAEFLDSFLELQNKQLTAAVLFKVPEDVVVQRLTSRLICPKCGRIYNMISLPPKEDELCDDCKVKLVQRDDDKEETVRHRLKVYLEKTQPVIDYYGKKGILKRVDGSQGIDNVVAEVLKIIGWSDK

SEQ ID NO: 361 - DNA, 693 bp, synthetic construct
  misc_feature 1..693: note = Variant of adenylate kinase
  source 1..693: mol_type = other DNA
atgcaccatcatcaccatcacgggggctccggcatgatggcatatctggtgttcttaggtccgccgggcgcgggaaaaggtacccaatcgaaacgcattcaggaaaagactggcatcccacatattagcacgggcgatatcttccgtgacatcgtcaagaaagagaacgatgaactgggcaagaagattaaagaaatcatggagaaaggtgaactcgttccagatgaactggtgaatgaggtagtaaaacgccgcctgtcggagaaagactgcgaaaaaggctttattttggatggttatccgcgtaccgttgctcaagcggtgttcctggacagttttcttgaatcccagaacaaacagttgacagccgccgtgctgttcaaagtccccgaagatgttgttgtgcaacgtttaacctctcgcctgatctgtccgaaatgcgggcgtatctacaatatgatttcactgccaccaaaagaagacgagctgtgtgacgattgcaaagtcaaattagtacagcgtgatgatgataaggaagaaacggttcgtcaccgcctgaaagtctaccttgagaagacccagccggtcattgactattatggcaagaaaggtattctcaaacgcgtagatgggtcgcaaggaatcgacaacgttgttgcagaagtcctgaagattattggttggagcgataag

SEQ ID NO: 362 - protein, 231 aa, synthetic construct
  REGION 1..231: note = Variant of adenylate kinase
MHHHHHHGGSGMMAYLVFLGPPGAGKGTQSKRIQEKTGIPHISTGDIFRDIVKKENDELGKKIKEIMEKGELVPDELVNEVVKRRLSEKDCEKGFILDGYPRTVAQAVFLDSFLESQNKQLTAAVLFKVPEDVVVQRLTSRLICPKCGRIYNMISLPPKEDELCDDCKVKLVQRDDDKEETVRHRLKVYLEKTQPVIDYYGKKGILKRVDGSQGIDNVVAEVLKIIGWSDK

SEQ ID NO: 363 - DNA, 693 bp, synthetic construct
  misc_feature 1..693: note = Variant of adenylate kinase
  source 1..693: mol_type = other DNA
atgcaccatcatcaccatcacgggggctccggcatgatggcatatctggtgttcttaggtccgccgggcgcgggaaaaggtacccaatcgaaacgcattcaggaaaagactggcatcccacatattagcacgggcgatatcttccgtgacatcgtcaagaaagagaacgatgaactgggcaagaagattaaagaaatcatggagaaaggtgaactcgttccagatgaactggtgaatgaggtagtaaaacgccgcctgtcggagaaagactgcgaaaaaggctttattttggatggttatccgcgtaccgttgctcaagcggaattcctggacagttttcttgaatcccagaacaaacagttgacagccgccgtgctgttcaaagtccccgaagatgttgttgtgcaacgtttaacctctcgcctgatctgtccgaaatgcgggcgtatctacaatatgatttcactgccaccaaaagaagacgagctgtgtgacgattgcaaagtcaaattagtacagcgtgatgatgataaggaagaaacggttcgtcaccgcctgaaagtctaccttgagaagacccagccggtcattgactattatggcaaggagggtattctcaaacgcgtagatgggtcgcaaggaatcgacaacgttgttgcagaagtcctgaagattattggttggagcgataag

SEQ ID NO: 364 - protein, 231 aa, synthetic construct
  REGION 1..231: note = Variant of adenylate kinase
MHHHHHHGGSGMMAYLVFLGPPGAGKGTQSKRIQEKTGIPHISTGDIFRDIVKKENDELGKKIKEIMEKGELVPDELVNEVVKRRLSEKDCEKGFILDGYPRTVAQAEFLDSFLESQNKQLTAAVLFKVPEDVVVQRLTSRLICPKCGRIYNMISLPPKEDELCDDCKVKLVQRDDDKEETVRHRLKVYLEKTQPVIDYYGKEGILKRVDGSQGIDNVVAEVLKIIGWSDK

SEQ ID NO: 365 - DNA, 693 bp, synthetic construct
  misc_feature 1..693: note = Variant of adenylate kinase
  source 1..693: mol_type = other DNA
atgcaccatcatcaccatcacgggggctccggcatgatggcatatctggtgttcttaggtccgccgggcgcgggaaaaggtacccaatcgaaacgcattcaggaaaagactggcatcccacatattagcacgggcgatatcttccgtgacatcgtcaagaaagagaacgatgaactgggcaagaagattaaagaaatcatggagaaaggtgaactcgttccagatgaactggtgaatgaggtagtaaaacgccgcctgtcggagaaagactgcgaaaaaggctttattttggatggttatccgcgtaccgttgctcaagcggaattcctggacagttttcttgaatcccagaacaaacagttgacagccgccgtgctgttcaaagtccccgaagatgttgttgtgcaacgtttaacctctcgcctgatctgtccgaaatgcgggcgtatctacaatatgatttcactgccaccaaaagaagacgagctgtgtgacgattgcaaagtcaaattagtacagcgtgatgatgataaggaagaaacggttcgtcaccgcctgaaagtctaccttgagaagacctttccggtcattgactattatggcaagaaaggtattctcaaacgcgtagatgggtcgcaaggaatcgacaacgttgttgcagaagtcctgaagattattggttggagcgataag

SEQ ID NO: 366 - protein, 231 aa, synthetic construct
  REGION 1..231: note = Variant of adenylate kinase
MHHHHHHGGSGMMAYLVFLGPPGAGKGTQSKRIQEKTGIPHISTGDIFRDIVKKENDELGKKIKEIMEKGELVPDELVNEVVKRRLSEKDCEKGFILDGYPRTVAQAEFLDSFLESQNKQLTAAVLFKVPEDVVVQRLTSRLICPKCGRIYNMISLPPKEDELCDDCKVKLVQRDDDKEETVRHRLKVYLEKTFPVIDYYGKKGILKRVDGSQGIDNVVAEVLKIIGWSDK

SEQ ID NO: 367 - DNA, 693 bp, synthetic construct
  misc_feature 1..693: note = Variant of adenylate kinase
  source 1..693: mol_type = other DNA
atgcaccatcatcaccatcacgggggctccggcatgatggcatatctggtgttcttaggtccgccgggcgcgggaaaaggtacccaatcgaaacgcattcaggaaaagactggcatcccacatattagcacgggcgatatcttccgtgacatcgtcaagaaagagaacgatgaactgggcaagaagattaaagaaatcatggagaaaggtgaactcgttccagatgaactggtgaatgaggtagtaaaacgccgcctgtcggagaaagactgcgaaaaaggctttattttggatggttatccgcgtaccgttgctcaagcggaattcctggacagttttcttgaatcccagaacaaacagttgacagccgccgtgctgttcaaagtccccgaagatgttgttgtgcaacgtatgacctctcgcctgatctgtccgaaatgcgggcgtatctacaatatgatttcactgccaccaaaagaagacgagctgtgtgacgattgcaaagtcaaattagtacagcgtgatgatgataaggaagaaacggttcgtcaccgcctgaaagtctaccttgagaagacccagccggtcattgactattatggcaagaaaggtattctcaaacgcgtagatgggtcgcaaggaatcgacaacgttgttgcagaagtcctgaagattattggttggagcgataag

SEQ ID NO: 368 - protein, 231 aa, synthetic construct
  REGION 1..231: note = Variant of adenylate kinase
MHHHHHHGGSGMMAYLVFLGPPGAGKGTQSKRIQEKTGIPHISTGDIFRDIVKKENDELGKKIKEIMEKGELVPDELVNEVVKRRLSEKDCEKGFILDGYPRTVAQAEFLDSFLESQNKQLTAAVLFKVPEDVVVQRMTSRLICPKCGRIYNMISLPPKEDELCDDCKVKLVQRDDDKEETVRHRLKVYLEKTQPVIDYYGKKGILKRVDGSQGIDNVVAEVLKIIGWSDK

SEQ ID NO: 369 - DNA, 693 bp, synthetic construct
  misc_feature 1..693: note = Variant of adenylate kinase
  source 1..693: mol_type = other DNA
atgcaccatcatcaccatcacgggggctccggcatgatggcatatctggtgttcttaggtccgccgggcgcgggaaaaggtacccaatcgaaacgcattcaggaaaagactggcatcccacatattagcacgggcgatatcttccgtgacatcgtcaagaaagagaacgatgaactgggcaagaagattaaagaaatcatggagaaaggtgaactcgttccagatgaactggtgaatgaggtagtaaaacgccgcctgtcggagaaagactgcgaaaaaggctttattttggatggttatccgcgtaccgttgctcaagcggaattcctggacagttttcttgaatcccagaacaaacagttgacagccgccgtgctgttcaaagtccccgaagatgttgttgtgcaacgtttaacctctcgcctgatctgtccgaaatgcgggcgtatctacaatatgatttcactgccaccaaaagaagacgagctgtgtgacgattgcaaagtcaaattagtacagcgtgatgatgatgaggaagaaacggttcgtcaccgcctgaaagtctaccttgagaagacccagccggtcattgactattatggcaagaaaggtattctcaaacgcgtagatgggtcgcaaggaatcgacaacgttgttgcagaagtcctgaagattattggttggagcgataag

SEQ ID NO: 370 - protein, 231 aa, synthetic construct
  REGION 1..231: note = Variant of adenylate kinase
MHHHHHHGGSGMMAYLVFLGPPGAGKGTQSKRIQEKTGIPHISTGDIFRDIVKKENDELGKKIKEIMEKGELVPDELVNEVVKRRLSEKDCEKGFILDGYPRTVAQAEFLDSFLESQNKQLTAAVLFKVPEDVVVQRLTSRLICPKCGRIYNMISLPPKEDELCDDCKVKLVQRDDDEEETVRHRLKVYLEKTQPVIDYYGKKGILKRVDGSQGIDNVVAEVLKIIGWSDK

SEQ ID NO: 371 - DNA, 693 bp, synthetic construct
  misc_feature 1..693: note = Variant of adenylate kinase
  source 1..693: mol_type = other DNA
atgcaccatcatcaccatcacgggggctccggcatgatggcatatctggtgttcttaggtccgccgggcgcgggaaaaggtacccaatcgaaacgcattcaggaaaagacttgtatcccacatattagcacgggcgatatcttccgtgacatcgtcaagaaagagaacgatgaactgggcaagaagattaaagaaatcatggagaaaggtgaactcgttccagatgaactggtgaatgaggtagtaaaacgccgcctgtcggagaaagactgcgaaaaaggctttattttggatggttatccgcgtaccgttgctcaagcggaattcctggacagttttcttgaatcccagaacaaacagttgacagccgccgtgctgttcaaagtccccgaagatgttgttgtgcaacgtttaacctctcgcctgatctgtccgaaatgcgggcgtatctacaatatgatttcactgccaccaaaagaagacgagctgtgtgacgattgcaaagtcaaattagtacagcgtgatgatgataaggaagaaacggttcgtcaccgcctgaaagtctaccttgagaagacccagccggtcattgactattatggcaagaaaggtattctcaaacgcgtagatgggtcgcaaggaatcgacaacgttgttgcagaagtcctgaagattattggttggagcgataag

SEQ ID NO: 372 - protein, 231 aa, synthetic construct
  REGION 1..231: note = Variant of adenylate kinase
MHHHHHHGGSGMMAYLVFLGPPGAGKGTQSKRIQEKTCIPHISTGDIFRDIVKKENDELGKKIKEIMEKGELVPDELVNEVVKRRLSEKDCEKGFILDGYPRTVAQAEFLDSFLESQNKQLTAAVLFKVPEDVVVQRLTSRLICPKCGRIYNMISLPPKEDELCDDCKVKLVQRDDDKEETVRHRLKVYLEKTQPVIDYYGKKGILKRVDGSQGIDNVVAEVLKIIGWSDK

SEQ ID NO: 373 - DNA, 693 bp, synthetic construct
  misc_feature 1..693: note = Variant of adenylate kinase
  source 1..693: mol_type = other DNA
atgcaccatcatcaccatcacgggggctccggcatgatggcatatctggtgttcttaggtccgccgggcgcgggaaaaggtacccaatcgaaacgcattcaggaaaagactggcatcccacatattagcacgggcgatatcttccgtgacatcgttaagaaagagaacgatgaactgggcaagaagattaaagaggaaatggaaaaaggtgaactcgttccagatgaactgggtaatgaggtagtaaaacgccgcctgtcggagaaagactgcgaaaaaggctttattttggatggttatccgcgtaccgttgctcaagcggaattcctggatagttttcttgaatcccagaacaaacagttgacagccgccgtgctgttcaaagtccccgaagatgttgttgtgcaacgtttaacctctcgcctgatctgtccgaaatgcgggcgtatctacaacatgatttttctgccaccaaaagaagacgagctgtgtgacgattgcaaagtcaaattagtacagcgtgatgatgataaggaagaaacggttcgtcaccgcctgaaagtctaccttgagaagacccagccggtcattgactattatggcaagaaaggtattctcaaacgcgtagatgggtcgcaaggaatcgacaacgttgttgcagaagtcctgaagattctgggttggagcgataag

SEQ ID NO: 374 - protein, 231 aa, synthetic construct
  REGION 1..231: note = Variant of adenylate kinase
MHHHHHHGGSGMMAYLVFLGPPGAGKGTQSKRIQEKTGIPHISTGDIFRDIVKKENDELGKKIKEEMEKGELVPDELGNEVVKRRLSEKDCEKGFILDGYPRTVAQAEFLDSFLESQNKQLTAAVLFKVPEDVVVQRLTSRLICPKCGRIYNMIFLPPKEDELCDDCKVKLVQRDDDKEETVRHRLKVYLEKTQPVIDYYGKKGILKRVDGSQGIDNVVAEVLKILGWSDK

SEQ ID NO: 375 - DNA, 693 bp, synthetic construct
  misc_feature 1..693: note = Variant of adenylate kinase
  source 1..693: mol_type = other DNA
atgcaccatcatcaccatcacgggggctccggcatgatggcatatctggtgttcttaggtccgccgggcgcgggaaaaggtacccaatcgaaacgcattcaggaaaagactggcatcccacatattagcacgggcgatatcttccgtgacatcgtcaagaaagagaacgatgaactgggcaagaagattaaagaaatcatggagaaaggtgaactcgttccagatgaactgggtaatgcggtagtaaaacgccgcctgtcggagaaagactgcgaaaaaggctttattttggatggttatccgcgtaccgttgctcaagcggaattcctggatagttttcttgaatcccagaacaaacagttgacagccgccgtgctgttcaaagtccccgaagatgttgttgtgcaacgtttaacctctcgcctgatctgtccgaaatgcgggcgtatctacaacatgatttttctgccaccaaaagaagacgagctgtgtgacgattgcaaagtcaaattagtacagcgtgatgatgataaggaagaaacggttcgtcaccgcctgaaagtctaccttgagaagacccagccggtcattgactattatggcaagaaaggtattctcaaacgcgtagatgggtcgcaaggaatcgacaacgttgttgcagaagtcctggggattctgggttggagcgataag

SEQ ID NO: 376 - protein, 231 aa, synthetic construct
  REGION 1..231: note = Variant of adenylate kinase
MHHHHHHGGSGMMAYLVFLGPPGAGKGTQSKRIQEKTGIPHISTGDIFRDIVKKENDELGKKIKEIMEKGELVPDELGNAVVKRRLSEKDCEKGFILDGYPRTVAQAEFLDSFLESQNKQLTAAVLFKVPEDVVVQRLTSRLICPKCGRIYNMIFLPPKEDELCDDCKVKLVQRDDDKEETVRHRLKVYLEKTQPVIDYYGKKGILKRVDGSQGIDNVVAEVLGILGWSDK

SEQ ID NO: 377 - DNA, 693 bp, synthetic construct
  misc_feature 1..693: note = Variant of adenylate kinase
  source 1..693: mol_type = other DNA
atgcaccatcatcaccatcacgggggctccggcatgatggcatatctggtgttcttaggtccgccgggcgcgggaaaaggtacccaatcgaaacgcattcaggaaaagactggcatcccacatattagcacgggcgatatcttccgtgacatcgttaagaaagagaacgatgaactgggcaagaagattaaagaaatcatggagaaaggtgaactcgttccagatgaactgggtaatgaggtagtaaaacgccgcctgtcggagaaagactgcgaaaaaggctttattttggatggttatccgcgtaccgttgctcaagcggaattcctggatagttttcttgaatcccagaacaaacagttgacagccgccgtgctgttcaaagtccccgaagatgttgttgtgcaacgtttaacctctcgcctgatctgtccgaaatgcgggcgtatctacaacatgatttttctgccaccaaaagaagacgagctgtgtgacgattgcaaagtcaaattagtacagcgtgatgatgataaggaagaaacggttcgtcaccgcctgaaagtctaccttgagaagacccagccggtcattgactattatggcaagaaaggtattctcaaacgcgtagatgggtcgcaaggaatcgacaacgttgttgcagaagtcctgaagattctgggttggagcgataag

SEQ ID NO: 378 - protein, 231 aa, synthetic construct
  REGION 1..231: note = Variant of adenylate kinase
MHHHHHHGGSGMMAYLVFLGPPGAGKGTQSKRIQEKTGIPHISTGDIFRDIVKKENDELGKKIKEIMEKGELVPDELGNEVVKRRLSEKDCEKGFILDGYPRTVAQAEFLDSFLESQNKQLTAAVLFKVPEDVVVQRLTSRLICPKCGRIYNMIFLPPKEDELCDDCKVKLVQRDDDKEETVRHRLKVYLEKTQPVIDYYGKKGILKRVDGSQGIDNVVAEVLKILGWSDK

SEQ ID NO: 379 - DNA, 693 bp, synthetic construct
  misc_feature 1..693: note = Variant of adenylate kinase
  source 1..693: mol_type = other DNA
atgcaccatcatcaccatcacgggggctccggcatgatggcatatctggtgttcttaggtccgccgggcgcgggaaaaggtacccaatcgaaacgcattcaggaaaagactggcatcccacatattagcacgggcgatatcttccgtgacatcgtcaagaaagagaacgatgaactgggcaagaagattaaaccagaaatggaaaaaggtgaactcgttccagatgaactggtgaatgaggtagtaaaacgccgcctgtcggagaaagactgcgaaaaaggctttattttggatggttatccgcgtaccgttgctcaagcggaattcctggatagttttcttgaatcccagaacaaacagttgacagccgccgtgctgttcaaagtccccgaagatgttgttgtgcaacgtttaacctctcgcctgatctgtccgaaatgcgggcgtatctacaacatgatttttctgccaccaaaagaagacgagctgtgtgacgattgcaaagtcaaattagtacagcgtgatgatgataaggaagaaacggttcgtcaccgcctgaaagtctaccttgagaagacccagccggtcattgactattatggcaagaaaggtattctcaaacgcgtagatgggtcgcaaggaatcgacaacgttgttgcagaagtcctgaagattctgggttggagcgataag

SEQ ID NO: 380 - protein, 231 aa, synthetic construct
  REGION 1..231: note = Variant of adenylate kinase
MHHHHHHGGSGMMAYLVFLGPPGAGKGTQSKRIQEKTGIPHISTGDIFRDIVKKENDELGKKIKPEMEKGELVPDELVNEVVKRRLSEKDCEKGFILDGYPRTVAQAEFLDSFLESQNKQLTAAVLFKVPEDVVVQRLTSRLICPKCGRIYNMIFLPPKEDELCDDCKVKLVQRDDDKEETVRHRLKVYLEKTQPVIDYYGKKGILKRVDGSQGIDNVVAEVLKILGWSDK

SEQ ID NO: 381 - DNA, 693 bp, synthetic construct
  misc_feature 1..693: note = Variant of adenylate kinase
  source 1..693: mol_type = other DNA
atgcaccatcatcaccatcacgggggctccggcatgatggcatatctggtgttcttaggtccgccgggcgcgggaaaaggtacccaatcgaaacgcattcaggaaaagactggcatcccacatattagcacgggcgatatcttccgtgacatcgtcaagaaagagaacgatgaactgggcaagaagattaaagaaatcatggagaaaggtgaactcgttccagatgaactgggtaatgaggtagtaaaacgccgcctgtcggagaaagactgcgaaaaaggctttattttggatggttatccgcgtaccgttgctcaagcggaattcctggatagttttcttgaatcccagaacaaacagttgacagccgccgtgctgttcaaagtccccgaagatgttgttgtgcaacgtttaacctctcgcctgatctgtccgaaatgcgggcgtatctacaacatgatttttctgccaccaaaagaagacgagctgtgtgacgattgcaaagtcaaattagtacagcgtgatgatgataaggaagaaacggttcgtcaccgcctgaaagtctaccttgagaagacccagccggtcattgactattatggcaagaaaggtattctcaaacgcgtagatgggtcgcaaggaatcgacaacgttgttgcagaagtcctggggattctgggttggagcgataag

SEQ ID NO: 382 - protein, 231 aa, synthetic construct
  REGION 1..231: note = Variant of adenylate kinase
MHHHHHHGGSGMMAYLVFLGPPGAGKGTQSKRIQEKTGIPHISTGDIFRDIVKKENDELGKKIKEIMEKGELVPDELGNEVVKRRLSEKDCEKGFILDGYPRTVAQAEFLDSFLESQNKQLTAAVLFKVPEDVVVQRLTSRLICPKCGRIYNMIFLPPKEDELCDDCKVKLVQRDDDKEETVRHRLKVYLEKTQPVIDYYGKKGILKRVDGSQGIDNVVAEVLGILGWSDK

SEQ ID NO: 383 - DNA, 693 bp, synthetic construct
  misc_feature 1..693: note = Variant of adenylate kinase
  source 1..693: mol_type = other DNA
atgcaccatcatcaccatcacgggggctccggcatgatggcatatctggtgttcttaggtccgccgggcgcgggaaaaggtacccaatcgaaacgcattcaggaaaagactggcatcccacatattagcacgggcgatatcttccgtgacatcgttaagaaagagaacgatgaactgggcaagaagattaaagaaatcatggagaaaggtgaactcgttccagatgaactgggtaatgcggtagtaaaacgccgcctgtcggagaaagactgcgaaaaaggctttattttggatggttatccgcgtaccgttgctcaagcggaagagctggacagttttcttgaatcccagaacaaacagttgacagccgccgtgctgttcaaagtccccgaagatgttgttgtgcaacgtttaacctctcgcctgatctgtccgaaatgcgggcgtatctacaacatgatttttctgccaccaaaagaagacgagctgtgtgacgattgcaaagtcaaattagtacagcgtgatgatgataaggaagaaacggttcgtcaccgcctgaaagtctaccttgagaagacccagccggtcattgactattatggcaagaaaggtattctcaaacgcgtagatgggtcgcaaggaatcgacaacgttgttgcagaagtcctgaagattctgggttggagcgataag

SEQ ID NO: 384 - protein, 231 aa, synthetic construct
  REGION 1..231: note = Variant of adenylate kinase
MHHHHHHGGSGMMAYLVFLGPPGAGKGTQSKRIQEKTGIPHISTGDIFRDIVKKENDELGKKIKEIMEKGELVPDELGNAVVKRRLSEKDCEKGFILDGYPRTVAQAEELDSFLESQNKQLTAAVLFKVPEDVVVQRLTSRLICPKCGRIYNMIFLPPKEDELCDDCKVKLVQRDDDKEETVRHRLKVYLEKTQPVIDYYGKKGILKRVDGSQGIDNVVAEVLKILGWSDK

SEQ ID NO: 385 - DNA, 693 bp, synthetic construct
  misc_feature 1..693: note = Variant of adenylate kinase
  source 1..693: mol_type = other DNA
atgcaccatcatcaccatcacgggggctccggcatgatggcatatctggtgttcttaggtccgccgggcgcgggaaaaggtacccaatcgaaacgcattcaggaaaagactggcatctttcatattagcacgggcgatatcttccgtgacatcgttaagaaagagaacgatgaactgagtaagaaaattaaagaaatcatggagaaaggtgaactcgttccagatgaactggtgaatgaggtagtaaaacgccgcctgtcggagaaagactgcgaaaagagttttattttggatggttatccgcgtaccgttgctcaagcggaattcctggatagttttcttgaatcccagaataaacagttgacagccgccgtgctgttcaaagtccccgaagatgttgttgtgcaacgtttaacctctcgcctgatctgtccgaaatgcgggcgtatctacaacatgatttttctgccaccaaaagaagacgagctgtgtgacgattgcaaagtcaaattagtacagcgtgatgatgataaggaagaaacggttcgtcaccgcctgaaagtctaccttgagaagacccagccggtcattgactattatggcaagaaaggtattctcaaacgcgtagatgggtcgcaaggaatcgacaacgttgttgcagaagtcctgaagattattggttggagcgataag

SEQ ID NO: 386 - protein, 231 aa, synthetic construct
  REGION 1..231: note = Variant of adenylate kinase
MHHHHHHGGSGMMAYLVFLGPPGAGKGTQSKRIQEKTGIFHISTGDIFRDIVKKENDELSKKIKEIMEKGELVPDELVNEVVKRRLSEKDCEKSFILDGYPRTVAQAEFLDSFLESQNKQLTAAVLFKVPEDVVVQRLTSRLICPKCGRIYNMIFLPPKEDELCDDCKVKLVQRDDDKEETVRHRLKVYLEKTQPVIDYYGKKGILKRVDGSQGIDNVVAEVLKIIGWSDK

SEQ ID NO: 387 - DNA, 693 bp, synthetic construct
  misc_feature 1..693: note = Variant of adenylate kinase
  source 1..693: mol_type = other DNA
atgcaccatcatcaccatcacgggggctccggcatgatggcatatctggtgttcttaggtccgccgggcgcgggaaaaggtacccaatcgaaacgcattcaggaaaagactggcatcccacatattagcacgggcgatatcttccgtgacatcgttaagaaagagaacgatgaactgggcaagaagattaaagaggcaatgcgtaaaggtgaactcgttccagatgaactggttaatgaggtagtaaaacgccgcctgtcggagaaagactgcgaaaaaggctttattttggatggttatccgcgtaccgttgctcaagcggaattcctggatagttttcttgaatcccagaacaaacagttgacagccgccgtgctgttcaaagtccccgaagatgttgttgtgcaacgtttaacctctcgcctgatctgtccgaaatgcgggcgtatctacaacatgatttttctgccaccaaaagaagacgagctgtgtgacgattgcaaagtcaaattagtacagcgtgatgatgataaggaagaaacggttcgtcaccgcctgaaagtctaccttgagaagacccagccggtcattgactattatggcaagaaaggtattctcaaacgcgtagatgggtcgcaaggaatcgacaacgttgttgcagaagtcctgaagattctgggttggagcgataag

SEQ ID NO: 388 - protein, 231 aa, synthetic construct
  REGION 1..231: note = Variant of adenylate kinase
MHHHHHHGGSGMMAYLVFLGPPGAGKGTQSKRIQEKTGIPHISTGDIFRDIVKKENDELGKKIKEAMRKGELVPDELVNEVVKRRLSEKDCEKGFILDGYPRTVAQAEFLDSFLESQNKQLTAAVLFKVPEDVVVQRLTSRLICPKCGRIYNMIFLPPKEDELCDDCKVKLVQRDDDKEETVRHRLKVYLEKTQPVIDYYGKKGILKRVDGSQGIDNVVAEVLKILGWSDK

SEQ ID NO: 389 - DNA, 693 bp, synthetic construct
  misc_feature 1..693: note = Variant of adenylate kinase
  source 1..693: mol_type = other DNA
atgcaccatcatcaccatcacgggggctccggcatgatggcatatctggtgttcttaggtccgccgggcgcgggaaaaggtacccaatcgaaacgcattcaggaaaagactggcatcccacatattagcacgggcgatatcttccgtgacatcgtcaagaaagagaacgatgaactgggcaagaagattaaagaggaaatgcgtaaaggtgaactcgttccagatgaactggttaatgaggtagtaaaacgccgcctgtcggagaaagactgcgaaaaaggctttattttggatggttatccgcgtaccgttgctcaagcggaattcctggatagttttcttgaatcccagaacaaacagttgacagccgccgtgctgttcaaagtccccgaagatgttgttgtgcaacgtttaacctctcgcctgatctgtccgaaatgcgggcgtatctacaacatgatttttctgccaccaaaagaagacgagctgtgtgacgattgcaaagtcaaattagtacagcgtgatgatgataaggaagaaacggttcgtcaccgcctgaaagtctaccttgagaagacccagccggtcattgactattatggcaagaaaggtattctcaaacgcgtagatgggtcgcaaggaatcgacaacgttgttgcagaagtcctgaagattctgggttggagcgataag

SEQ ID NO: 390 - protein, 231 aa, synthetic construct
  REGION 1..231: note = Variant of adenylate kinase
MHHHHHHGGSGMMAYLVFLGPPGAGKGTQSKRIQEKTGIPHISTGDIFRDIVKKENDELGKKIKEEMRKGELVPDELVNEVVKRRLSEKDCEKGFILDGYPRTVAQAEFLDSFLESQNKQLTAAVLFKVPEDVVVQRLTSRLICPKCGRIYNMIFLPPKEDELCDDCKVKLVQRDDDKEETVRHRLKVYLEKTQPVIDYYGKKGILKRVDGSQGIDNVVAEVLKILGWSDK

SEQ ID NO: 391 - DNA, 693 bp, synthetic construct
  misc_feature 1..693: note = Variant of adenylate kinase
  source 1..693: mol_type = other DNA
atgcaccatcatcaccatcacgggggctccggcatgatggcatatctggtgttcttaggtccgccgggcgcgggaaaaggtacccaatcgaaacgcattcaggaaaagactggcatcccacatattagcacgggcgatatcttccgtgacatcgtcaagaaagagaacgatgaactgggcaagaagattaaagaaatcatggagaaaggtgaactcgttccagatgaactgggtaatgcggtagtaaaacgccgcctgtcggagaaagactgcgaaaaaggctttattttggatggttatccgcgtaccgttgctcaagcggaattcctggatagttttcttgaatcccagaacaaacagttgacagccgccgtgctgttcaaagtccccgaagatgttgttgtgcaacgtttaacctctcgcctgatctgtccgaaatgcgggcgtatctacaacatgatttttctgccaccaaaagaagacgagctgtgtgacgattgcaaagtcaaattagtacagcgtgatgatgataaggaagaaacggttcgtcaccgcctgaaagtctaccttgaaaagacccagccggtcattgactattatggcaagaaaggtattctcaaacgcgtagatgggtcgcaaggaatcgacaacgttgttgcagaagtcctgaagattctgggttggagcgataag

SEQ ID NO: 392 - protein, 231 aa, synthetic construct
  REGION 1..231: note = Variant of adenylate kinase
MHHHHHHGGSGMMAYLVFLGPPGAGKGTQSKRIQEKTGIPHISTGDIFRDIVKKENDELGKKIKEIMEKGELVPDELGNAVVKRRLSEKDCEKGFILDGYPRTVAQAEFLDSFLESQNKQLTAAVLFKVPEDVVVQRLTSRLICPKCGRIYNMIFLPPKEDELCDDCKVKLVQRDDDKEETVRHRLKVYLEKTQPVIDYYGKKGILKRVDGSQGIDNVVAEVLKILGWSDK

SEQ ID NO: 393 - DNA, 693 bp, synthetic construct
  misc_feature 1..693: note = Variant of adenylate kinase
  source 1..693: mol_type = other DNA
atgcaccatcatcaccatcacgggggctccggcatgatggcatatctggtgttcttaggtccgccgggcgcgggaaaaggtacccaatcgaaacgcattcaggaaaagactggcatcccacatattagcacgggcgatatcttccgtgacatcgttaagaaagagaacgatgaactgggcaagaagattaaagaaatcatggagaaaggtgaactcgttccagatgaactggtgaatgaggtagtaaaacgccgcctgtcggagaaagactgcgaaaagagttttattttggatggttatccgcgtaccgttgctcaagcggaattcctggatagttttcttgaatccaaccgtaaacagttgacagccgccgtgctgttcaaagtccccgaagatgttgttgtgcaacgtttaacctctcgcctgatctgtccgaaatgcgggcgtatctacaacatgatttttctgccaccaaaagaagacgagctgtgtgacgattgcaaagtcaaattagtacagcgtgatgatgataaggaagaaacggttcgtcaccgcctgaaagtctaccttgagaagacccagccggtcattgactattatggcaagaaaggtattctcaaacgcgtagatgggtcgcaaggaatcgacaacgttgttgcagaagtcctgaagattattggttggagcgataag

SEQ ID NO: 394 - protein, 231 aa, synthetic construct
  REGION 1..231: note = Variant of adenylate kinase
MHHHHHHGGSGMMAYLVFLGPPGAGKGTQSKRIQEKTGIPHISTGDIFRDIVKKENDELGKKIKEIMEKGELVPDELVNEVVKRRLSEKDCEKSFILDGYPRTVAQAEFLDSFLESNRKQLTAAVLFKVPEDVVVQRLTSRLICPKCGRIYNMIFLPPKEDELCDDCKVKLVQRDDDKEETVRHRLKVYLEKTQPVIDYYGKKGILKRVDGSQGIDNVVAEVLKIIGWSDK

SEQ ID NO: 395 - DNA, 693 bp, synthetic construct
  misc_feature 1..693: note = Variant of adenylate kinase
  source 1..693: mol_type = other DNA
atgcaccatcatcaccatcacgggggctccggcatgatggcatatctggtgttcttaggtccgccgggcgcgggaaaaggtacccaatcgaaacgcattcaggaaaagactggcatcccacatattagcacgggcgatatcttccgtgacatcgttaagaaagagaacgatgaactgggcaagaagattaaagagatcatgcgtaaaggtgaactcgttccagatgaactggttaatgaggtagtaaaacgccgcctgtcggagaaagactgcgaaaaaggctttattttggatggttatccgcgtaccgttgctcaagcggaagagctggacagttttcttgaatcccagaacaaacagttgacagccgccgtgctgttcaaagtccccgaagatgttgttgtgcaacgtttaacctctcgcctgatctgtccgaaatgcgggcgtatctacaacatgatttttctgccaccaaaagaagacgagctgtgtgacgattgcaaagtcaaattagtacagcgtgatgatgataaggaagaaacggttcgtcaccgcctgaaagtctaccttgaaaagacccagccggtcattgactattatggcaagaaaggtattctcaaacgcgtagatgggtcgcaaggaatcgacaacgttgttgcagaagtcctgaagattctgggttggagcgataag

SEQ ID NO: 396 - protein, 231 aa, synthetic construct
  REGION 1..231: note = Variant of adenylate kinase
MHHHHHHGGSGMMAYLVFLGPPGAGKGTQSKRIQEKTGIPHISTGDIFRDIVKKENDELGKKIKEIMRKGELVPDELVNEVVKRRLSEKDCEKGFILDGYPRTVAQAEELDSFLESQNKQLTAAVLFKVPEDVVVQRLTSRLICPKCGRIYNMIFLPPKEDELCDDCKVKLVQRDDDKEETVRHRLKVYLEKTQPVIDYYGKKGILKRVDGSQGIDNVVAEVLKILGWSDK

SEQ ID NO: 397 - DNA, 693 bp, synthetic construct
  misc_feature 1..693: note = Variant of adenylate kinase
  source 1..693: mol_type = other DNA
atgcaccatcatcaccatcacgggggctccggcatgatggcatatctggtgttcttaggtccgccgggcgcgggaaaaggtacccaatcgaaacgcattcaggaaaagactggcatcccacatattagcacgggcgatatcttccgtgacatcgtcaagaaagagaacgatgaactgggcaagaagattaaagagatcatgcgtaaaggtgaactcgttccagatgaactggtgaatgaggtagtaaaacgccgcctgtcggagaaagactgcgaaaaaggctttattttggatggttatccgcgtaccgttgctcaagcggaattcctggatagttttcttgaatcccagaacaaacagttgacagccgccgtgctgttcaaagtccccgaagatgttgttgtgcaacgtttaacctctcgcctgatctgtccgaaatgcgggcgtatctacaacatgatttttctgccaccaaaagaagacgagctgtgtgacgattgcaaagtcaaattagtacagcgtgatgatgataaggaagaaacggttcgtcaccgcctgaaagtctaccttgagaagacccagccggtcattgactattatggcaagaaaggtattctcaaacgcgtagatgggtcgcaaggaatcgacaacgttgttgcagaagtcctgaagattctgggttggagcgataag

SEQ ID NO: 398 - protein, 231 aa, synthetic construct
  REGION 1..231: note = Variant of adenylate kinase
MHHHHHHGGSGMMAYLVFLGPPGAGKGTQSKRIQEKTGIPHISTGDIFRDIVKKENDELGKKIKEIMRKGELVPDELVNEVVKRRLSEKDCEKGFILDGYPRTVAQAEFLDSFLESQNKQLTAAVLFKVPEDVVVQRLTSRLICPKCGRIYNMIFLPPKEDELCDDCKVKLVQRDDDKEETVRHRLKVYLEKTQPVIDYYGKKGILKRVDGSQGIDNVVAEVLKILGWSDK

SEQ ID NO: 399 - DNA, 693 bp, synthetic construct
  misc_feature 1..693: note = Variant of adenylate kinase
  source 1..693: mol_type = other DNA
atgcaccatcatcaccatcacgggggctccggcatgatggcatatctggtgttcttaggtccgccgggcgcgggaaaaggtacccaatcgaaacgcattcaggaaaagactggcatcccacatattagcacgggcgatatcttccgtgacatcgttaagaaagagaacgatgaactgggcaagaagattaaagaaatcatggagaaaggtgaactcgttccagatgaactggtgaatgaggtagtaaaacgccgcctgtcggagaaagactgcgaaaagagttttattttggatggttatccgcgtaccgttgctcaagcggaattcctggatagttttcttgaatcccagaacaaacagttgacagccgccgtgctgttcaaagtccccgaagatgttgttgtgcaacgtttaacctctcgcctgatctgtccgaaatgcgggcgtatctacaacatgatttttctgccaccaaaagaagacgagctgtgtgacgattgcaaagtcaaattagtacagcgtgatgatgataaactggaaacggttcgtcaccgcctgaaagtctaccttgagaagacccagccggtcattgactattatggcaagaaaggtattctcaaacgcgtagatgggtcgcaaggaatcgacaacgttgttgcagaagtcctgaagattctgggttggagcgataag

SEQ ID NO: 400 - protein, 231 aa, synthetic construct
  REGION 1..231: note = Variant of adenylate kinase
MHHHHHHGGSGMMAYLVFLGPPGAGKGTQSKRIQEKTGIPHISTGDIFRDIVKKENDELGKKIKEIMEKGELVPDELVNEVVKRRLSEKDCEKSFILDGYPRTVAQAEFLDSFLESQNKQLTAAVLFKVPEDVVVQRLTSRLICPKCGRIYNMIFLPPKEDELCDDCKVKLVQRDDDKLETVRHRLKVYLEKTQPVIDYYGKKGILKRVDGSQGIDNVVAEVLKILGWSDK

SEQ ID NO: 401 - DNA, 693 bp, synthetic construct
  misc_feature 1..693: note = Variant of adenylate kinase
  source 1..693: mol_type = other DNA
atgcaccatcatcaccatcacgggggctccggcatgatggcatatctggtgttcttaggtccgccgggcgcgggaaaaggtacccaatcgaaacgcattcaggaaaagactggcatcccacatattagcacgggcgatatcttccgtgaccgtgtcaagaaagagaacgatgaactgggcaagaagattaaagaggaaatgcgtaaaggtgaactcgttccagatgaactggtgaatgaggtagtaaaacgccgcctgtcggagaaagactgcgaaaaaggctttattttggatggttatccgcgtaccgttgctcaagcggaattcctggatagttttcttgaatcccagaacaaacagttgacagccgccgtgctgttcaaagtccccgaagatgttgttgtgcaacgtttaacctctcgcctgatctgtccgaaatgcgggcgtatctacaacatgatttttctgccaccaaaagaagacgagctgtgtgacgattgcaaagtcaaattagtacagcgtgatgatgataaggaagaaacggttcgtcaccgcctgaaagtctaccttgagaagacccagccggtcattgactattatggcaagaaaggtattctcaaacgcgtagatgggtcgcaaggaatcgacaacgttgttgcagaagtcctggggattctgggttggagcgataag

SEQ ID NO: 402 - protein, 231 aa, synthetic construct
  REGION 1..231: note = Variant of adenylate kinase
MHHHHHHGGSGMMAYLVFLGPPGAGKGTQSKRIQEKTGIPHISTGDIFRDRVKKENDELGKKIKEEMRKGELVPDELVNEVVKRRLSEKDCEKGFILDGYPRTVAQAEFLDSFLESQNKQLTAAVLFKVPEDVVVQRLTSRLICPKCGRIYNMIFLPPKEDELCDDCKVKLVQRDDDKEETVRHRLKVYLEKTQPVIDYYGKKGILKRVDGSQGIDNVVAEVLGILGWSDK

SEQ ID NO: 403 - DNA, 693 bp, synthetic construct
  misc_feature 1..693: note = Variant of adenylate kinase
  source 1..693: mol_type = other DNA
atgcaccatcatcaccatcacgggggctccggcatgatggcatatctggtgttcttaggtccgccgggcgcgggaaaaggtacccaatcgaaacgcattcaggaaaagactggcatcccacatattagcacgggcgatatcttccgtgacatcgttaagaaagagaacgatgaactgggcaagaagattaaagaaatcatggagaaaggtgaactcgttccagatgaactggtgaatgaggtagtaaaacgccgcctgtcggagaaagactgcgaaaagagttttattttggatggttatccgcgtaccgttgctcaagcggaattcctggatagttttcttgaatccaacaataaacagttgacagccgccgtgctgttcaaagtccccgaagatgttgttgtgcaacgtttaacctctcgcctgatctgtccgaaatgcgggcgtatctacaacatgatttttctgccaccaaaagaagacgagctgtgtgacgattgcaaagtcaaattagtacagcgtgatgatgataaggaagaaacggttcgtcaccgcctgaaagtctaccttgagaagacccagccggtcattgactattatggcaagaaaggtattctcaaacgcgtagatgggtcgcaaggaatcgacaacgttgttgcagaagtcctgaagattctgggttggagcgataag

SEQ ID NO: 404 - protein, 231 aa, synthetic construct
  REGION 1..231: note = Variant of adenylate kinase
MHHHHHHGGSGMMAYLVFLGPPGAGKGTQSKRIQEKTGIPHISTGDIFRDIVKKENDELGKKIKEIMEKGELVPDELVNEVVKRRLSEKDCEKSFILDGYPRTVAQAEFLDSFLESNNKQLTAAVLFKVPEDVVVQRLTSRLICPKCGRIYNMIFLPPKEDELCDDCKVKLVQRDDDKEETVRHRLKVYLEKTQPVIDYYGKKGILKRVDGSQGIDNVVAEVLKILGWSDK

SEQ ID NO: 405 - DNA, 693 bp, synthetic construct
  misc_feature 1..693: note = Variant of adenylate kinase
  source 1..693: mol_type = other DNA
atgcaccatcatcaccatcacgggggctccggcatgatggcatatctggtgttcttaggtccgccgggcgcgggaaaaggtacccaatcgaaacgcattcaggaaaagactggcatcccacatattagcacgggcgatatcttccgtgaccgtgtcaagaaagagaacgatgaactgggcaagaagattaaagaggaaatgcgtaaaggtgaactcgttccagatgaactgggtaatgaggtagtaaaacgccgcctgtcggagaaagactgcgaaaaaggctttattttggatggttatccgcgtaccgttgctcaagcggaattcctggatagttttcttgaatcccagaacaaacagttgacagccgccgtgctgttcaaagtccccgaagatgttgttgtgcaacgtttaacctctcgcctgatctgtccgaaatgcgggcgtatctacaacatgatttttctgccaccaaaagaagacgagctgtgtgacgattgcaaagtcaaattagtacagcgtgatgatgataaggaagaaacggttcgtcaccgcctgaaagtctaccttgagaagacccagccggtcattgactattatggcaagaaaggtattctcaaacgcgtagatgggtcgcaaggaatcgacaacgttgttgcagaagtcctggggattctgggttggagcgataag

SEQ ID NO: 406 - protein, 231 aa, synthetic construct
  REGION 1..231: note = Variant of adenylate kinase
MHHHHHHGGSGMMAYLVFLGPPGAGKGTQSKRIQEKTGIPHISTGDIFRDRVKKENDELGKKIKEEMRKGELVPDELGNEVVKRRLSEKDCEKGFILDGYPRTVAQAEFLDSFLESQNKQLTAAVLFKVPEDVVVQRLTSRLICPKCGRIYNMIFLPPKEDELCDDCKVKLVQRDDDKEETVRHRLKVYLEKTQPVIDYYGKKGILKRVDGSQGIDNVVAEVLGILGWSDK

SEQ ID NO: 407 - DNA, 693 bp, synthetic construct
  misc_feature 1..693: note = Variant of adenylate kinase
  source 1..693: mol_type = other DNA
atgcaccatcatcaccatcacgggggctccggcatgatggcatatctggtgttcttaggtccgccgggcgcgggaaaaggtacccaatcgaaacgcattcaggaaaagactggcatcccacatattagcacgggcgatatcttccgtgacatcgtcaagaaagagaacgatgaactgggcaagaagattaaagaggaaatggaaaaaggtgaactcgttccagatgaactggtgaatgaggtagtaaaacgccgcctgtcggagaaagactgcgaaaaaggctttattttggatggttatccgcgtaccgttgctcaagcggaattcctggatagttttcttgaatcccagaacaaacagttgacagccgccgtgctgttcaaagtccccgaagatgttgttgtgcaacgtttaacctctcgcctgatctgtccgaaatgcgggcgtatctacaacatgatttttctgccaccaaaagaagacgagctgtgtgacgattgcaaagtcaaattagtacagcgtgatgatgataaggaagaaacggttcgtcaccgcctgaaagtctaccttgagaagacccagccggtcattgactattatggcaagaaaggtattctcaaacgcgtagatgggtcgcaaggaatcgacaacgttgttgcagaagtcctgaagattctgggttggagcgataag

SEQ ID NO: 408 - protein, 231 aa, synthetic construct
  REGION 1..231: note = Variant of adenylate kinase
MHHHHHHGGSGMMAYLVFLGPPGAGKGTQSKRIQEKTGIPHISTGDIFRDIVKKENDELGKKIKEEMEKGELVPDELVNEVVKRRLSEKDCEKGFILDGYPRTVAQAEFLDSFLESQNKQLTAAVLFKVPEDVVVQRLTSRLICPKCGRIYNMIFLPPKEDELCDDCKVKLVQRDDDKEETVRHRLKVYLEKTQPVIDYYGKKGILKRVDGSQGIDNVVAEVLKILGWSDK

SEQ ID NO: 409 - DNA, 693 bp, synthetic construct
  misc_feature 1..693: note = Variant of adenylate kinase
  source 1..693: mol_type = other DNA
atgcaccatcatcaccatcacgggggctccggcatgatggcatatctggtgttcttaggtccgccgggcgcgggaaaaggtacccaatcgaaacgcattcaggaaaagactggcatcccacatattagcacgggcgatatcttccgtgacatcgttaagaaagagaacgatgaactgggcaagaagattaaagaaatcatggagaaaggtgaactcgttccagatgaactggtgaatgaggtagtaaaacgccgcctgtcggagaaagactgcgaaaagggctttattttggatggttatccgcgtaccgttgctcaagcggaattcctggatagttttcttgaatcccagcgtaaacagttgacagccgccgtgctgttcaaagtccccgaagatgttgttgtgcaacgtttaacctctcgcctgatctgtccgaaatgcgggcgtatctacaacatgatttttctgccaccaaaagaagacgagctgtgtgacgattgcaaagtcaaattagtacagcgtgatgatgataaggaagaaacggttcgtcaccgcctgaaagtctaccttgagaagacccagccggtcattgactattatggcaagaaaggtattctcaaacgcgtagatgggtcgcaaggaatcgacaacgttgttgcagaagtcctgaagattctgggttggagcgataag

SEQ ID NO: 410 - protein, 231 aa, synthetic construct
  REGION 1..231: note = Variant of adenylate kinase
MHHHHHHGGSGMMAYLVFLGPPGAGKGTQSKRIQEKTGIPHISTGDIFRDIVKKENDELGKKIKEIMEKGELVPDELVNEVVKRRLSEKDCEKGFILDGYPRTVAQAEFLDSFLESQRKQLTAAVLFKVPEDVVVQRLTSRLICPKCGRIYNMIFLPPKEDELCDDCKVKLVQRDDDKEETVRHRLKVYLEKTQPVIDYYGKKGILKRVDGSQGIDNVVAEVLKILGWSDK

SEQ ID NO: 411 - DNA, 693 bp, synthetic construct
  misc_feature 1..693: note = Variant of adenylate kinase
  source 1..693: mol_type = other DNA
atgcaccatcatcaccatcacgggggctccggcatgatggcatatctggtgttcttaggtccgccgggcgcgggaaaaggtacccaatcgaaacgcattcaggaaaagactggcatcccacatattagcacgggcgatatcttccgtgacatcgttaagaaagagaacgatgaactgggcaagaagattaaagaaatcatggagaaaggtgaactcgttccagatgaactggtgaatgaggtagtaaaacgccgcctgtcggagaaagactgcgaagtgagttttattttggatggttatccgcgtaccgttgctcaagcggaattcctggatagttttcttgaatcccagaacaaacagttgacagccgccgtgctgttcaaagtccccgaagatgttgttgtgcaacgtttaacctctcgcctgatctgtccgaaatgcgggcgtatctacaacatgatttttctgccaccaaaagaagacgagctgtgtgacgattgcaaagtcaaattagtacagcgtgatgatgataaagagccgacggttcgtcaccgcctgaaagtctaccttgagaagacccagccggtcattgactattatggcaagaaaggtattctcaaacgcgtagatgggtcgcaaggaatcgacaacgttgttgcagaagtcctgaagattctgggttggagcgataag

SEQ ID NO: 412 - protein, 231 aa, synthetic construct
  REGION 1..231: note = Variant of adenylate kinase
MHHHHHHGGSGMMAYLVFLGPPGAGKGTQSKRIQEKTGIPHISTGDIFRDIVKKENDELGKKIKEIMEKGELVPDELVNEVVKRRLSEKDCEVSFILDGYPRTVAQAEFLDSFLESQNKQLTAAVLFKVPEDVVVQRLTSRLICPKCGRIYNMIFLPPKEDELCDDCKVKLVQRDDDKEPTVRHRLKVYLEKTQPVIDYYGKKGILKRVDGSQGIDNVVAEVLKILGWSDK

SEQ ID NO: 413 - DNA, 693 bp, synthetic construct
  misc_feature 1..693: note = Variant of adenylate kinase
  source 1..693: mol_type = other DNA
atgcaccatcatcaccatcacgggggctccggcatgatggcatatctggtgttcttaggtccgccgggcgcgggaaaaggtacccaatcgaaacgcattcaggaaaagactggcatcccacatattagcacgggcgatatcttccgtgacatcgttaagaaagagaacgatgaactgggcaagaagattaaagaaatcatggagaaaggtgaactcgttccagatgaactggtgaatgaggtagtaaaacgccgcctgtcggagaaagactgcgaaaaaggctttattttggatggttatccgcgtaccgttgctcaagcggaagagctggacagttttcttgaatcccagaacaaacagttgacagccgccgtgctgttcaaagtccccgaagatgttgttgtgcaacgtttaacctctcgcctgatctgtccgaaatgcgggcgtatctacaacatgatttttctgccaccaaaagaagacgagctgtgtgacgattgcaaagtcaaattagtacagcgtgatgatgataaggaagaaacggttcgtcaccgcctgaaagtctaccttgagaagacccagccggtcattgactattatggcaagaaaggtattctcaaacgcgtagatgggtcgcaaggaatcgacaacgttgttgcagaagtcctgaagattctgggttggagcgataag

SEQ ID NO: 414 - protein, 231 aa, synthetic construct
  REGION 1..231: note = Variant of adenylate kinase
MHHHHHHGGSGMMAYLVFLGPPGAGKGTQSKRIQEKTGIPHISTGDIFRDIVKKENDELGKKIKEIMEKGELVPDELVNEVVKRRLSEKDCEKGFILDGYPRTVAQAEELDSFLESQNKQLTAAVLFKVPEDVVVQRLTSRLICPKCGRIYNMIFLPPKEDELCDDCKVKLVQRDDDKEETVRHRLKVYLEKTQPVIDYYGKKGILKRVDGSQGIDNVVAEVLKILGWSDK

SEQ ID NO: 415 - DNA, 693 bp, synthetic construct
  misc_feature 1..693: note = Variant of adenylate kinase
  source 1..693: mol_type = other DNA
atgcaccatcatcaccatcacgggggctccggcatgatggcatatctggtgttcttaggtccgccgggcgcgggaaaaggtacccaatcgaaacgcattcaggaaaagactggcatcccacatattagcacgggcgatatcttccgtgacatcgtcaagaaagagaacgatgaactgggcaagaagattaaagagatcatgcgtaaaggtgaactcgttccagatgaactggtgaatgaggtagtaaaacgccgcctgtcggagaaagactgcgaaaaaggctttattttggatggttatccgcgtaccgttgctcaagcggaattcctggacagttttcttgaatcccagaacaaacagttgacagccgccgtgctgttcaaagtccccgaagatgttgttgtgcaacgtttaacctctcgcctgatctgtccgaaatgcgggcgtatctacaacatgatttttctgccaccaaaagaagacgagctgtgtgacgattgcaaagtcaaattagtacagcgtgatgatgataaggaagaaacggttcgtcaccgcctgaaagtctaccttgagaagacccagccggtcattgactattatggcaagaaaggtattctcaaacgcgtagatgggtcgcaaggaatcgacaacgttgttgcagaagtcctggggattctgggttggagcgataag

SEQ ID NO: 416 - protein, 231 aa, synthetic construct
  REGION 1..231: note = Variant of adenylate kinase
MHHHHHHGGSGMMAYLVFLGPPGAGKGTQSKRIQEKTGIPHISTGDIFRDIVKKENDELGKKIKEIMRKGELVPDELVNEVVKRRLSEKDCEKGFILDGYPRTVAQAEFLDSFLESQNKQLTAAVLFKVPEDVVVQRLTSRLICPKCGRIYNMIFLPPKEDELCDDCKVKLVQRDDDKEETVRHRLKVYLEKTQPVIDYYGKKGILKRVDGSQGIDNVVAEVLGILGWSDK

SEQ ID NO: 417 - DNA, 693 bp, synthetic construct
  misc_feature 1..693: note = Variant of adenylate kinase
  source 1..693: mol_type = other DNA
atgcaccatcatcaccatcacgggggctccggcatgatggcatatctggtgttcttaggtccgccgggcgcgggaaaaggtacccaatcgaaacgcattcaggaaaagactggcatctttcatattagcacgggcgatatcttccgtgacatcgttaagaaagagaacgatgaactgggtaagctgattaaagaaatcatggagaaaggtgaactcgttccagatgaactggtgaatgaggtagtaaaacgccgcctgtcggagaaagactgcgaagtgggctttattttggatggttatccgcgtaccgttgctcaagcggaattcctggatagttttcttgaatcccagaacaaacagttgacagccgccgtgctgttcaaagtccccgaagatgttgttgtgcaacgtttaacctctcgcctgatctgtccgaaatgcgggcgtatctacaacatgatttttctgccaccaaaagaagacgagctgtgtgacgattgcaaagtcaaattagtacagcgtgatgatgataaggaagaaacggttcgtcaccgcctgaaagtctaccttgagaagacccagccggtcattgactattatggcaagaaaggtattctcaaacgcgtagatgggtcgcaaggaatcgacaacgttgttgcagaagtcctgaagattctgggttggagcgataag

SEQ ID NO: 418 - protein, 231 aa, synthetic construct
  REGION 1..231: note = Variant of adenylate kinase
MHHHHHHGGSGMMAYLVFLGPPGAGKGTQSKRIQEKTGIFHISTGDIFRDIVKKENDELGKLIKEIMEKGELVPDELVNEVVKRRLSEKDCEVGFILDGYPRTVAQAEFLDSFLESQNKQLTAAVLFKVPEDVVVQRLTSRLICPKCGRIYNMIFLPPKEDELCDDCKVKLVQRDDDKEETVRHRLKVYLEKTQPVIDYYGKKGILKRVDGSQGIDNVVAEVLKILGWSDK

SEQ ID NO: 419 - DNA, 693 bp, synthetic construct
  misc_feature 1..693: note = Variant of adenylate kinase
  source 1..693: mol_type = other DNA
atgcaccatcatcaccatcacgggggctccggcatgatggcatatctggtgttcttaggtccgccgggcgcgggaaaaggtacccaatcgaaacgcattcaggaaaagactggcatcccacatattagcacgggcgatatcttccgtgacatcgttaagaaagagaacgatgaactgggcaagaagattaaagaaatcatggagaaaggtgaactcgttccagatgaactggtgaatgaggtagtaaaacgccgcctgtcggagaaagactgcgaagtgggctttattttggatggttatccgcgtaccgttgctcaagcggaattcctggatagttttcttgaatcccagaacaaacagttgacagccgccgtgctgttcaaagtccccgaagatgttgttgtgcaacgtttaacctctcgcctgatctgtccgaaatgcgggcgtatctacaacatgatttttctgccaccaaaagaagacgagctgtgtgacgattgcaaagtcaaattagtacagcgtgatgatgataaggaagaaacggttcgtcaccgcctgaaagtctaccttgagaagacccagccggtcattgactattatggcaagaaaggtattctcaaacgcgtagatgggtcgcaaggaatcgacaacgttgttgcagaagtcctgaagattctgggttggagcgataag

SEQ ID NO: 420 - protein, 231 aa, synthetic construct
  REGION 1..231: note = Variant of adenylate kinase
MHHHHHHGGSGMMAYLVFLGPPGAGKGTQSKRIQEKTGIPHISTGDIFRDIVKKENDELGKKIKEIMEKGELVPDELVNEVVKRRLSEKDCEVGFILDGYPRTVAQAEFLDSFLESQNKQLTAAVLFKVPEDVVVQRLTSRLICPKCGRIYNMIFLPPKEDELCDDCKVKLVQRDDDKEETVRHRLKVYLEKTQPVIDYYGKKGILKRVDGSQGIDNVVAEVLKILGWSDK

SEQ ID NO: 421 - DNA, 693 bp, synthetic construct
  misc_feature 1..693: note = Variant of adenylate kinase
  source 1..693: mol_type = other DNA
atgcaccatcatcaccatcacgggggctccggcatgatggcatatctggtgttcttaggtccgccgggcgcgggaaaaggtacccaatcgaaacgcattcaggaaaagactggcatcccacatattagcacgggcgatatcttccgtgaccgtgtcaagaaagagaacgatgaactgggcaagaagattaaagaggaaatggaaaaaggtgaactcgttccagatgaactggtgaatgaggtagtaaaacgccgcctgtcggagaaagactgcgaaaaaggctttattttggatggttatccgcgtaccgttgctcaagcggaattcctggatagttttcttgaatcccagaacaaacagttgacagccgccgtgctgttcaaagtccccgaagatgttgttgtgcaacgtttaacctctcgcctgatctgtccgaaatgcgggcgtatctacaacatgatttttctgccaccaaaagaagacgagctgtgtgacgattgcaaagtcaaattagtacagcgtgatgatgataaggaagaaacggttcgtcaccgcctgaaagtctaccttgagaagacccagccggtcattgactattatggcaagaaaggtattctcaaacgcgtagatgggtcgcaaggaatcgacaacgttgttgcagaagtcctgaagattctgggttggagcgataag

SEQ ID NO: 422 - protein, 231 aa, synthetic construct
  REGION 1..231: note = Variant of adenylate kinase
MHHHHHHGGSGMMAYLVFLGPPGAGKGTQSKRIQEKTGIPHISTGDIFRDRVKKENDELGKKIKEEMEKGELVPDELVNEVVKRRLSEKDCEKGFILDGYPRTVAQAEFLDSFLESQNKQLTAAVLFKVPEDVVVQRLTSRLICPKCGRIYNMIFLPPKEDELCDDCKVKLVQRDDDKEETVRHRLKVYLEKTQPVIDYYGKKGILKRVDGSQGIDNVVAEVLKILGWSDK

SEQ ID NO: 423 - DNA, 693 bp, synthetic construct
  misc_feature 1..693: note = Variant of adenylate kinase
  source 1..693: mol_type = other DNA
atgcaccatcatcaccatcacgggggctccggcatgatggcatatctggtgttcttaggtccgccgggcgcgggaaaaggtacccaatcgaaacgcattcaggaaaagactggcatcccacatattagcacgggcgatatcttccgtgacatcgttaagaaagagaacgatgaactgggcaagaagattaaagaaatcatggagaaaggtgaactcgttccagatgaactggtgaatgaggtagtaaaacgccgcctgtcggagaaagactgcgaaaagagttttattttggatggttatccgcgtaccgttgctcaagcggaattcctggatagttttcttgaatccaaccgtaaacagttgacagccgccgtgctgttcaaagtccccgaagatgttgttgtgcaacgtttaacctctcgcctgatctgtccgaaatgcgggcgtatctacaacatgatttttctgccaccaaaagaagacgagctgtgtgacgattgcaaagtcaaattagtacagcgtgatgatgataaggaagaaacggttcgtcaccgcctgaaagtctaccttgagaagacccagccggtcattgactattatggcaagaaaggtattctcaaacgcgtagatgggtcgcaaggaatcgacaacgttgttgcagaagtcctgaagattctgggttggagcgataag

SEQ ID NO: 424 - protein, 231 aa, synthetic construct
  REGION 1..231: note = Variant of adenylate kinase
MHHHHHHGGSGMMAYLVFLGPPGAGKGTQSKRIQEKTGIPHISTGDIFRDIVKKENDELGKKIKEIMEKGELVPDELVNEVVKRRLSEKDCEKSFILDGYPRTVAQAEFLDSFLESNRKQLTAAVLFKVPEDVVVQRLTSRLICPKCGRIYNMIFLPPKEDELCDDCKVKLVQRDDDKEETVRHRLKVYLEKTQPVIDYYGKKGILKRVDGSQGIDNVVAEVLKILGWSDK

SEQ ID NO: 425 - DNA, 693 bp, synthetic construct
  misc_feature 1..693: note = Variant of adenylate kinase
  source 1..693: mol_type = other DNA
atgcaccatcatcaccatcacgggggctccggcatgatggcatatctggtgttcttaggtccgccgggcgcgggaaaaggtacccaatcgaaacgcattcaggaaaagactggcatcccacatattagcacgggcgatatcttccgtgacatcgttaagaaagagaacgatgaactgggcaagaagattaaagaaatcatggagaaaggtgaactcgttccagatgaactggtgaatgaggtagtaaaacgccgcctgtcggagaaagactgcgaaaaaggctttattttggatggttatccgcgtaccgttgctcaagcggaattcctggatagttttcttgaatcccagaacaaacagttgacagccgccgtgctgttcaaagtccccgaagatgttgttgtgcaacgtttaacctctcgcctgatctgtccgaaatgcgggcgtatctacaacatgatttttctgccaccaaaagaagacgagctgtgtgacgattgcaaagtcaaattagtacagcgtgatgatgataaggaagaaacggttcgtcaccgcctgaaagtctaccttgagaagacccagccggtcattggctattatggcaagaaaggtattctcaaacgcgtagatgggtcgcaaggaatcgacaacgttgttgaagaagtcctgaagattctgggttggagcgataag

SEQ ID NO: 426 - protein, 231 aa, synthetic construct
  REGION 1..231: note = Variant of adenylate kinase
MHHHHHHGGSGMMAYLVFLGPPGAGKGTQSKRIQEKTGIPHISTGDIFRDIVKKENDELGKKIKEIMEKGELVPDELVNEVVKRRLSEKDCEKGFILDGYPRTVAQAEFLDSFLESQNKQLTAAVLFKVPEDVVVQRLTSRLICPKCGRIYNMIFLPPKEDELCDDCKVKLVQRDDDKEETVRHRLKVYLEKTQPVIGYYGKKGILKRVDGSQGIDNVVEEVLKILGWSDK

SEQ ID NO: 427 - DNA, 693 bp, synthetic construct
  misc_feature 1..693: note = Variant of adenylate kinase
  source 1..693: mol_type = other DNA
atgcaccatcatcaccatcacgggggctccggcatgatggcatatctggtgttcttaggtccgccgggcgcgggaaaaggtacccaatcgaaacgcattcaggaaaagactggcatcccacatattagcacgggcgatatcttccgtgacatcgttaagaaagagaacgatgaactgggcaagaagattaaagaaatcatggagaaaggtgaactcgttccagatgaactggtgaatgaggtagtaaaacgccgcctgtcggagaaagactgcgaagtgggctttattttggatggttatccgcgtaccgttgctcaagcggaattcctggatagttttcttgaatccaacaataaacagttgacagccgccgtgctgttcaaagtccccgaagatgttgttgtgcaacgtttaacctctcgcctgatctgtccgaaatgcgggcgtatctacaacatgatttttctgccaccaaaagaagacgagctgtgtgacgattgcaaagtcaaattagtacagcgtgatgatgataaagaggaaacggttcgtcaccgcctgaaagtctaccttgagaagacccagccggtcattgactattatggcaagaaaggtattctcaaacgcgtagatgggtcgcaaggaatcgacaacgttgttgcagaagtcctgaagattctgggttggagcgataag

SEQ ID NO: 428 - protein, 231 aa, synthetic construct
  REGION 1..231: note = Variant of adenylate kinase
MHHHHHHGGSGMMAYLVFLGPPGAGKGTQSKRIQEKTGIPHISTGDIFRDIVKKENDELGKKIKEIMEKGELVPDELVNEVVKRRLSEKDCEVGFILDGYPRTVAQAEFLDSFLESNNKQLTAAVLFKVPEDVVVQRLTSRLICPKCGRIYNMIFLPPKEDELCDDCKVKLVQRDDDKEETVRHRLKVYLEKTQPVIDYYGKKGILKRVDGSQGIDNVVAEVLKILGWSDK

SEQ ID NO: 429 - DNA, 693 bp, synthetic construct
  misc_feature 1..693: note = Variant of adenylate kinase
  source 1..693: mol_type = other DNA
atgcaccatcatcaccatcacgggggctccggcatgatggcatatctggtgttcttaggtccgccgggcgcgggaaaaggtacccaatcgaaacgcattcaggaaaagactggcatcccacatattagcacgggcgatatcttccgtgacatcgttaagaaagagaacgatgaactgggcaagaagattaaagaaatcatggagaaaggtgaactcgttccagatgaactggtgaatgaggtagtaaaacgccgcctgtcggagaaagactgcgaaaaaggctttattttggatggttatccgcgtaccgttgctcaagcggaattcctggatagttttcttgaatccaaccgtaaacagttgacagccgccgtgctgttcaaagtccccgaagatgttgttgtgcaacgtttaacctctcgcctgatctgtccgaaatgcgggcgtatctacaacatgatttttctgccaccaaaagaagacgagctgtgtgacgattgcaaagtcaaattagtacagcgtgatgatgataaggaagaaacggttcgtcaccgcctgaaagtctaccttgagaagacccagccggtcattgactattatggcaagaaaggtattctcaaacgcgtagatgggtcgcaaggaatcgacaacgttgttgcagaagtcctgaagattctgggttggagcgataag

SEQ ID NO: 430 - protein, 231 aa, synthetic construct
  REGION 1..231: note = Variant of adenylate kinase
MHHHHHHGGSGMMAYLVFLGPPGAGKGTQSKRIQEKTGIPHISTGDIFRDIVKKENDELGKKIKEIMEKGELVPDELVNEVVKRRLSEKDCEKGFILDGYPRTVAQAEFLDSFLESNRKQLTAAVLFKVPEDVVVQRLTSRLICPKCGRIYNMIFLPPKEDELCDDCKVKLVQRDDDKEETVRHRLKVYLEKTQPVIDYYGKKGILKRVDGSQGIDNVVAEVLKILGWSDK

SEQ ID NO: 431 - DNA, 693 bp, synthetic construct
  misc_feature 1..693: note = Variant of adenylate kinase
  source 1..693: mol_type = other DNA
atgcaccatcatcaccatcacgggggctccggcatgatggcatatctggtgttcttaggtccgccgggcgcgggaaaaggtacccaatcgaaacgcattcaggaaaagactggcatcccacatattagcacgggcgatatcttccgtgacatcgttaagaaagagaacgatgaactgggcaagaagattaaagaaatcatggagaaaggtgaactcgttccagatgaactggtgaatgaggtagtaaaacgccgcctgtcggagaaagactgcgaagtgggctttattttggatggttatccgcgtaccgttgctcaagcggaattcctggatagttttcttgaatcccagaataaacagttgacagccgccgtgctgttcaaagtccccgaagatgttgttgtgcaacgtttaacctctcgcctgatctgtccgaaatgcgggcgtatctacaacatgatttttctgccaccaaaagaagacgagctgtgtgacgattgcaaagtcaaattagtacagcgtgatgatgataaggaagaaacggttcgtcaccgcctgaaagtctaccttgagaagacccagccggtcattggctattatggcaagaaaggtattctcaaacgcgtagatgggtcgcaaggaatcgacaacgttgttgcagaagtcctgaagattctgggttggagcgataag

SEQ ID NO: 432 - protein, 231 aa, synthetic construct
  REGION 1..231: note = Variant of adenylate kinase
MHHHHHHGGSGMMAYLVFLGPPGAGKGTQSKRIQEKTGIPHISTGDIFRDIVKKENDELGKKIKEIMEKGELVPDELVNEVVKRRLSEKDCEVGFILDGYPRTVAQAEFLDSFLESQNKQLTAAVLFKVPEDVVVQRLTSRLICPKCGRIYNMIFLPPKEDELCDDCKVKLVQRDDDKEETVRHRLKVYLEKTQPVIGYYGKKGILKRVDGSQGIDNVVAEVLKILGWSDK

SEQ ID NO: 433 - DNA, 693 bp, synthetic construct
  misc_feature 1..693: note = Variant of adenylate kinase
  source 1..693: mol_type = other DNA
atgcaccatcatcaccatcacgggggctccggcatgatggcatatctggtgttcttaggtccgccgggcgcgggaaaaggtacccaatcgaaacgcattcaggaaaagactggcatcccacatattagcacgggcgatatcttccgtgacatcgtcaagaaagagaacgatgaactgggcaagaagattaaagagatcatgcgtaaaggtgaactcgttccagatgaactggttaatgaggtagtaaaacgccgcctgtcggagaaagactgcgaaaaaggctttattttggatggttatccgcgtaccgttgctcaagcggaattcctggatagttttcttgaatcccagaacaaacagttgacagccgccgtgctgttcaaagtccccgaagatgttgttgtgcaacgtttaacctctcgcctgatctgtccgaaatgcgggcgtatctacaacatgatttttctgccaccaaaagaagacgagctgtgtgacgattgcaaagtcaaattagtacgccgtgatgatgataaggaagaaacggttcgtcaccgcctgaaagtctaccttgagaagacccagccggtcattgactattatggcaagaaaggtattctcaaacgcgtagatgggtcgcaaggaatcgacaacgttgttgcagaagtcctgaagattctgggttggagcgataag

SEQ ID NO: 434 - protein, 231 aa, synthetic construct
  REGION 1..231: note = Variant of adenylate kinase
MHHHHHHGGSGMMAYLVFLGPPGAGKGTQSKRIQEKTGIPHISTGDIFRDIVKKENDELGKKIKEIMRKGELVPDELVNEVVKRRLSEKDCEKGFILDGYPRTVAQAEFLDSFLESQNKQLTAAVLFKVPEDVVVQRLTSRLICPKCGRIYNMIFLPPKEDELCDDCKVKLVRRDDDKEETVRHRLKVYLEKTQPVIDYYGKKGILKRVDGSQGIDNVVAEVLKILGWSDK

SEQ ID NO: 435 - DNA, 693 bp, synthetic construct
  misc_feature 1..693: note = Variant of adenylate kinase
  source 1..693: mol_type = other DNA
atgcaccatcatcaccatcacgggggctccggcatgatggcatatctggtgttcttaggtccgccgggcgcgggaaaaggtacccaatcgaaacgcattcaggaaaagactggcatctttcatattagcacgggcgatatcttccgtgacatcgttaagaaagagaacgatgaactgggcaagaagattaaagaaatcatggagaaaggtgaactcgttccagatgaactggtgaatgaggtagtaaaacgccgcctgtcggagaaagactgcgaaaagggctttattttggatggttatccgcgtaccgttgctcaagcggaattcctggatagttttcttgaatccaacaataaacagttgacagccgccgtgctgttcaaagtccccgaagatgttgttgtgcaacgtttaacctctcgcctgatctgtccgaaatgcgggcgtatctacaacatgatttttctgccaccaaaagaagacgagctgtgtgacgattgcaaagtcaaattagtacagcgtgatgatgataaggaagaaacggttcgtcaccgcctgaaagtctaccttgagaagacccagccggtcattgactattatggcaagaaaggtattctcaaacgcgtagatgggtcgcaaggaatcgacaacgttgttgcagaagtcctgaagattctgggttggagcgataag

SEQ ID NO: 436 - protein, 231 aa, synthetic construct
  REGION 1..231: note = Variant of adenylate kinase
MHHHHHHGGSGMMAYLVFLGPPGAGKGTQSKRIQEKTGIFHISTGDIFRDIVKKENDELGKKIKEIMEKGELVPDELVNEVVKRRLSEKDCEKGFILDGYPRTVAQAEFLDSFLESNNKQLTAAVLFKVPEDVVVQRLTSRLICPKCGRIYNMIFLPPKEDELCDDCKVKLVQRDDDKEETVRHRLKVYLEKTQPVIDYYGKKGILKRVDGSQGIDNVVAEVLKILGWSDK

SEQ ID NO: 437 - DNA, 693 bp, synthetic construct
  misc_feature 1..693: note = Variant of adenylate kinase
  source 1..693: mol_type = other DNA
atgcaccatcatcaccatcacgggggctccggcatgatggcatatctggtgttcttaggtccgccgggcgcgggaaaaggtacccaatcgaaacgcattcaggaaaagactggcatcccacatattagcacgggcgatatcttccgtgacatcgttaagaaagagaacgatgaactgggcaagaagattaaagaaatcatggagaaaggtgaactcgttccagatgaactggtgaatgaggtagtaaaacgccgcctgtcggagaaagactgcgaaaaaggctttattttggatggttatccgcgtaccgttgctcaagcggaattcctggatagttttcttgaatcccagaacaaacagttgacagccgccgtgctgttcaaagtccccgaagatgttgttgtgcaacgtttaacctctcgcctgatctgtccgaaatgcgggcgtatctacaacatgatttttctgccaccaaaagaagacgagctgtgtgacgattgcaaagtcaaattagtacagcgtgatgatgataaggaagaaacggttcgtcaccgcctgaaagtctaccttgagaagacccagccggtcattgactattatggcaagaaaggtattctcaaacgcgtagatgggtcgcaaggaatcgacaacgttgttgcagaagtcctggggattctgggttggagcgataag

SEQ ID NO: 438 - protein, 231 aa, synthetic construct
  REGION 1..231: note = Variant of adenylate kinase
MHHHHHHGGSGMMAYLVFLGPPGAGKGTQSKRIQEKTGIPHISTGDIFRDIVKKENDELGKKIKEIMEKGELVPDELVNEVVKRRLSEKDCEKGFILDGYPRTVAQAEFLDSFLESQNKQLTAAVLFKVPEDVVVQRLTSRLICPKCGRIYNMIFLPPKEDELCDDCKVKLVQRDDDKEETVRHRLKVYLEKTQPVIDYYGKKGILKRVDGSQGIDNVVAEVLGILGWSDK

SEQ ID NO: 439 - DNA, 693 bp, synthetic construct
  misc_feature 1..693: note = Variant of adenylate kinase
  source 1..693: mol_type = other DNA
atgcaccatcatcaccatcacgggggctccggcatgatggcatatctggtgttcttaggtccgccgggcgcgggaaaaggtacccaatcgaaacgcattcaggaaaagactggcatctttcatattagcacgggcgatatcttccgtgacatcgttaagaaagagaacgatgaactgggtaagaaaattaaagaaatcatggagaaaggtgaactcgttccagatgaactggtgaatgaggtagtaaaacgccgcctgtcggagaaagactgcgaaaaaggctttattttggatggttatccgcgtaccgttgctcaagcggaattcctggatagttttcttgaatcccagcgtaaacagttgacagccgccgtgctgttcaaagtccccgaagatgttgttgtgcaacgtttaacctctcgcctgatctgtccgaaatgcgggcgtatctacaacatgatttttctgccaccaaaagaagacgagctgtgtgacgattgcaaagtcaaattagtacagcgtgatgatgataaagaggaaacggttcgtcaccgcctgaaagtctaccttgagaagacccagccggtcattgactattatggcaagaaaggtattctcaaacgcgtagatgggtcgcaaggaatcgacaacgttgttgcagaagtcctgaagattattggttggagcgataag

SEQ ID NO: 440 - protein, 231 aa, synthetic construct
  REGION 1..231: note = Variant of adenylate kinase
MHHHHHHGGSGMMAYLVFLGPPGAGKGTQSKRIQEKTGIFHISTGDIFRDIVKKENDELGKKIKEIMEKGELVPDELVNEVVKRRLSEKDCEKGFILDGYPRTVAQAEFLDSFLESQRKQLTAAVLFKVPEDVVVQRLTSRLICPKCGRIYNMIFLPPKEDELCDDCKVKLVQRDDDKEETVRHRLKVYLEKTQPVIDYYGKKGILKRVDGSQGIDNVVAEVLKIIGWSDK

SEQ ID NO: 441 - DNA, 693 bp, synthetic construct
  misc_feature 1..693: note = Variant of adenylate kinase
  source 1..693: mol_type = other DNA
atgcaccatcatcaccatcacgggggctccggcatgatggcatatctggtgttcttaggtccgccgggcgcgggaaaaggtacccaatcgaaacgcattcaggaaaagactggcatcccacatattagcacgggcgatatcttccgtgacatcgttaagaaagagaacgatgaactgggcaagaagattaaagaaatcatggagaaaggtgaactcgttccagatgaactggtgaatgaggtagtaaaacgccgcctgtcggagaaagactgcgaagtgagttttattttggatggttatccgcgtaccgttgctcaagcggaattcctggatagttttcttgaatcccagaataaacagttgacagccgccgtgctgttcaaagtccccgaagatgttgttgtgcaacgtttaacctctcgcctgatctgtccgaaatgcgggcgtatctacaacatgatttttctgccaccaaaagaagacgagctgtgtgacgattgcaaagtcaaattagtacagcgtgatgatgataaggaagaaacggttcgtcaccgcctgaaagtctaccttgagaagacccagccggtcattgactattatggcaagaaaggtattctcaaacgcgtagatgggtcgcaaggaatcgacaacgttgttgcagaagtcctgaagattctgggttggagcgataag

SEQ ID NO: 442 - protein, 231 aa, synthetic construct
  REGION 1..231: note = Variant of adenylate kinase
MHHHHHHGGSGMMAYLVFLGPPGAGKGTQSKRIQEKTGIPHISTGDIFRDIVKKENDELGKKIKEIMEKGELVPDELVNEVVKRRLSEKDCEVSFILDGYPRTVAQAEFLDSFLESQNKQLTAAVLFKVPEDVVVQRLTSRLICPKCGRIYNMIFLPPKEDELCDDCKVKLVQRDDDKEETVRHRLKVYLEKTQPVIDYYGKKGILKRVDGSQGIDNVVAEVLKILGWSDK

SEQ ID NO: 443 - DNA, 693 bp, synthetic construct
  misc_feature 1..693: note = Variant of adenylate kinase
  source 1..693: mol_type = other DNA
atgcaccatcatcaccatcacgggggctccggcatgatggcatatctggtgttcttaggtccgccgggcgcgggaaaaggtacccaatcgaaacgcattcaggaaaagactggcatctttcatattagcacgggcgatatcttccgtgacatcgttaagaaagagaacgatgaactgggtaagctgattaaagaaatcatggagaaaggtgaactcgttccagatgaactggtgaatgaggtagtaaaacgccgcctgtcggagaaagactgcgaaaagggctttattttggatggttatccgcgtaccgttgctcaagcggaattcctggatagttttcttgaatcccagcgtaaacagttgacagccgccgtgctgttcaaagtccccgaagatgttgttgtgcaacgtttaacctctcgcctgatctgtccgaaatgcgggcgtatctacaacatgatttttctgccaccaaaagaagacgagctgtgtgacgattgcaaagtcaaattagtacagcgtgatgatgataaggaagaaacggttcgtcaccgcctgaaagtctaccttgagaagacccagccggtcattgactattatggcaagaaaggtattctcaaacgcgtagatgggtcgcaaggaatcgacaacgttgttgcagaagtcctgaagattctgggttggagcgataag

SEQ ID NO: 444 - protein, 231 aa, synthetic construct
  REGION 1..231: note = Variant of adenylate kinase
MHHHHHHGGSGMMAYLVFLGPPGAGKGTQSKRIQEKTGIFHISTGDIFRDIVKKENDELGKLIKEIMEKGELVPDELVNEVVKRRLSEKDCEKGFILDGYPRTVAQAEFLDSFLESQRKQLTAAVLFKVPEDVVVQRLTSRLICPKCGRIYNMIFLPPKEDELCDDCKVKLVQRDDDKEETVRHRLKVYLEKTQPVIDYYGKKGILKRVDGSQGIDNVVAEVLKILGWSDK

SEQ ID NO: 445 - DNA, 693 bp, synthetic construct
  misc_feature 1..693: note = Variant of adenylate kinase
  source 1..693: mol_type = other DNA
atgcaccatcatcaccatcacgggggctccggcatgtcggcatatctggtgttcttaggtccgccgggcgcgggaaaaggtacccaatcgaaacgcattcaggaaaagactggcatcccacatattagcacgggcgatatcttccgtgacatcgtcaagaaagagaacgatgaactgggcaagaagattaaagaaatcatggagaaaggtgaactcgttccagatgaactgggtaatgcggtagtaaaacgccgcctgtcggagaaagactgcgaaaaaggctttattttggatggttatccgcgtaccgttgctcaagcggaattcctggatagttttcttgaatcccagaacaaacagttgacagccgccgtgctgttcaaagtccccgaagatgttgttgtgcaacgtttaacctctcgcctgatctgtccgaaatgcgggcgtatctacaacatgatttttctgccaccaaaagaagacgagctgtgtgacgattgcaaagtcaaattagtacagcgtgatgatgataaggaagaaacggttcgtcaccgcctgaaagtctaccttgagaagacccagccggtcattgactattatggcaagaaaggtattctcaaacgcgtagatgggtcgcaaggaatcgacaacgttgttgcagaagtcctggggattctgggttggagcgataag

SEQ ID NO: 446 - protein, 231 aa, synthetic construct
  REGION 1..231: note = Variant of adenylate kinase
MHHHHHHGGSGMSAYLVFLGPPGAGKGTQSKRIQEKTGIPHISTGDIFRDIVKKENDELGKKIKEIMEKGELVPDELGNAVVKRRLSEKDCEKGFILDGYPRTVAQAEFLDSFLESQNKQLTAAVLFKVPEDVVVQRLTSRLICPKCGRIYNMIFLPPKEDELCDDCKVKLVQRDDDKEETVRHRLKVYLEKTQPVIDYYGKKGILKRVDGSQGIDNVVAEVLGILGWSDK

SEQ ID NO: 447 - DNA, 693 bp, synthetic construct
  misc_feature 1..693: note = Variant of adenylate kinase
  source 1..693: mol_type = other DNA
atgcaccatcatcaccatcacgggggctccggcatgatggcatatctggtgttcttaggtccgccgggcgcgggaaaaggtacccaatcgaaacgcattcaggaaaagactggcatcccacatattagcacgggcgatatcttccgtgacatcgtcaagaaagagaacgatgaactggctaagaagattaaagaaatcatggagaaaggtgaactcgttccagatgaactgggtaatgcggtagtaaaacgccgcctgtcggagaaagactgcgaaaaaggctttattttggatggttatccgcgtaccgttgctcaagcggaattcctggatagttttcttgaatcccagaacaaacagttgacagccgccgtgctgttcaaagtccccgaagatgttgttgtgcaacgtttaacctctcgcctgatctgtccgaaatgcgggcgtatctacaacatgatttttctgccaccaaaagaagacgagctgtgtgacgattgcaaagtcaaattagtacagcgtgatgatgataaggaagaaacggttcgtcaccgcctgaaagtctaccttgagaagacccagccggtcattgactattatggcaagaaaggtattctcaaacgcgtagatgggtcgcaaggaatcgacaacgttgttgcagaagtcctggggattctgggttggagcgataag

SEQ ID NO: 448 - protein, 231 aa, synthetic construct
  REGION 1..231: note = Variant of adenylate kinase
MHHHHHHGGSGMMAYLVFLGPPGAGKGTQSKRIQEKTGIPHISTGDIFRDIVKKENDELAKKIKEIMEKGELVPDELGNAVVKRRLSEKDCEKGFILDGYPRTVAQAEFLDSFLESQNKQLTAAVLFKVPEDVVVQRLTSRLICPKCGRIYNMIFLPPKEDELCDDCKVKLVQRDDDKEETVRHRLKVYLEKTQPVIDYYGKKGILKRVDGSQGIDNVVAEVLGILGWSDK

SEQ ID NO: 449 - DNA, 693 bp, synthetic construct
  misc_feature 1..693: note = Variant of adenylate kinase
  source 1..693: mol_type = other DNA
atgcaccatcatcaccatcacgggggctccggcatgatggcatatctggtgttcttaggtccgccgggcgcgggaaaaggtacccaatcgaaacgcattcaggaaaagactggcatcccacatattagcacgggcgatatcttccgtgacatcgtcaagaaagagaacgatgaactgggcaagaagattaaagaaatcatggagaaaggtgaactcgttccagatgaactgggtaatgcggtagtaaaacgccgcctgtcggagaaagactgcgaaaaaggctttattttggatggttatccgcgtaccgttgctcaagcggaattcctggatagttttcttgaatcccagaacaaacagttgacagccgccgtggagttcaaagtccccgaagatgttgttgtgcaacgtttaacctctcgcctgatctgtccgaaatgcgggcgtatctacaacatgatttttctgccaccaaaagaagacgagctgtgtgacgattgcaaagtcaaattagtacagcgtgatgatgataaggaagaaacggttcgtcaccgcctgaaagtctaccttgagaagacccagccggtcattgactattatggcaagaaaggtattctcaaacgcgtagatgggtcgcaaggaatcgacaacgttgttgcagaagtcctggggattctgggttggagcgataag

SEQ ID NO: 450 - protein, 231 aa, synthetic construct
  REGION 1..231: note = Variant of adenylate kinase
MHHHHHHGGSGMMAYLVFLGPPGAGKGTQSKRIQEKTGIPHISTGDIFRDIVKKENDELGKKIKEIMEKGELVPDELGNAVVKRRLSEKDCEKGFILDGYPRTVAQAEFLDSFLESQNKQLTAAVEFKVPEDVVVQRLTSRLICPKCGRIYNMIFLPPKEDELCDDCKVKLVQRDDDKEETVRHRLKVYLEKTQPVIDYYGKKGILKRVDGSQGIDNVVAEVLGILGWSDK

SEQ ID NO: 451 - DNA, 693 bp, synthetic construct
  misc_feature 1..693: note = Variant of adenylate kinase
  source 1..693: mol_type = other DNA
atgcaccatcatcaccatcacgggggctccggcatgatggcatatctggtgttcttaggtccgccgggcgcgggaaaaggtacccaatcgaaacgcattcaggaaaagactggcatcccacatattagcacgggcgatatcttccgtgacatcgtcaagaaagagaacgatgaactgggcaagaagattaaagaaatcatggagaaaggtgaactcgttccagatgaactgggtaatgcggtagtaaaacgccgcctgtcggagaaagactgcgaaaaaggctttattttggatggttatccgcgtaccctggctcaagcggaattcctggatagttttcttgaatcccagaacaaacagttgacagccgccgtgctgttcaaagtccccgaagatgttgttgtgcaacgtttaacctctcgcctgatctgtccgaaatgcgggcgtatctacaacatgatttttctgccaccaaaagaagacgagctgtgtgacgattgcaaagtcaaattagtacagcgtgatgatgataaggaagaaacggttcgtcaccgcctgaaagtctaccttgagaagacccagccggtcattgactattatggcaagaaaggtattctcaaacgcgtagatgggtcgcaaggaatcgacaacgttgttgcagaagtcctggggattctgggttggagcgataag

SEQ ID NO: 452 - protein, 231 aa, synthetic construct
  REGION 1..231: note = Variant of adenylate kinase
MHHHHHHGGSGMMAYLVFLGPPGAGKGTQSKRIQEKTGIPHISTGDIFRDIVKKENDELGKKIKEIMEKGELVPDELGNAVVKRRLSEKDCEKGFILDGYPRTLAQAEFLDSFLESQNKQLTAAVLFKVPEDVVVQRLTSRLICPKCGRIYNMIFLPPKEDELCDDCKVKLVQRDDDKEETVRHRLKVYLEKTQPVIDYYGKKGILKRVDGSQGIDNVVAEVLGILGWSDK

SEQ ID NO: 453 - DNA, 693 bp, synthetic construct
  misc_feature 1..693: note = Variant of adenylate kinase
  source 1..693: mol_type = other DNA
atgcaccatcatcaccatcacgggggctccggcatgatggcatatctggtgttcttaggtccgccgggcgcgggaaaaggtacccaatcgaaacgcattcaggaaaagactggcatcccacatattagcacgggcgatatcttccgtgacatcgtcaagaaagagaacgatgaactgggcaagaagattaaagaaatcatggagaaaggtgaactcgttccagatgaactgggtaatgcggtagtaaaacgccgcctgtcggagaaagactgcgaaaaaggctttattttggatggttatccgcgtaccgttgctcaagcggaattcctggatagttttcttgaatcccagaacaaacagttgacagccgccgtgctgttcaaagtccccgaagatgttgttgtgcaacgtttaacctctcgcctgatctgtccgaaatgcgggcgtatctacaacatgatttttctgccaccaaaagaagacgagctgtgtgacgattgcaaagtcaaattagtacagcgtgatgatgataaggaagaaacggttcgtcaccgcctgaaagtctaccttgagaagacccagccggtcattgactattatagtaagaaaggtattctcaaacgcgtagatgggtcgcaaggaatcgacaacgttgttgcagaagtcctggggattctgggttggagcgataag

SEQ ID NO: 454 - protein, 231 aa, synthetic construct
  REGION 1..231: note = Variant of adenylate kinase
MHHHHHHGGSGMMAYLVFLGPPGAGKGTQSKRIQEKTGIPHISTGDIFRDIVKKENDELGKKIKEIMEKGELVPDELGNAVVKRRLSEKDCEKGFILDGYPRTVAQAEFLDSFLESQNKQLTAAVLFKVPEDVVVQRLTSRLICPKCGRIYNMIFLPPKEDELCDDCKVKLVQRDDDKEETVRHRLKVYLEKTQPVIDYYSKKGILKRVDGSQGIDNVVAEVLGILGWSDK

SEQ ID NO: 455 - DNA, 693 bp, synthetic construct
  misc_feature 1..693: note = Variant of adenylate kinase
  source 1..693: mol_type = other DNA
atgcaccatcatcaccatcacgggggctccggcatgatggcatatctggtgttcttaggtccgccgggcgcgggaaaaggtacccaatcgaaacgcattcaggaaaagactggcatcccacatattagcacgggcgatatcttccgtgacatcgtcaagaaagagaacgatgaagagggcaagaagattaaagaaatcatggagaaaggtgaactcgttccagatgaactgggtaatgcggtagtaaaacgccgcctgtcggagaaagactgcgaaaaaggctttattttggatggttatccgcgtaccgttgctcaagcggaattcctggatagttttcttgaatcccagaacaaacagttgacagccgccgtgctgttcaaagtccccgaagatgttgttgtgcaacgtttaacctctcgcctgatctgtccgaaatgcgggcgtatctacaacatgatttttctgccaccaaaagaagacgagctgtgtgacgattgcaaagtcaaattagtacagcgtgatgatgataaggaagaaacggttcgtcaccgcctgaaagtctaccttgagaagacccagccggtcattgactattatggcaagaaaggtattctcaaacgcgtagatgggtcgcaaggaatcgacaacgttgttgcagaagtcctggggattctgggttggagcgataag

SEQ ID NO: 456 - protein, 231 aa, synthetic construct
  REGION 1..231: note = Variant of adenylate kinase
MHHHHHHGGSGMMAYLVFLGPPGAGKGTQSKRIQEKTGIPHISTGDIFRDIVKKENDEEGKKIKEIMEKGELVPDELGNAVVKRRLSEKDCEKGFILDGYPRTVAQAEFLDSFLESQNKQLTAAVLFKVPEDVVVQRLTSRLICPKCGRIYNMIFLPPKEDELCDDCKVKLVQRDDDKEETVRHRLKVYLEKTQPVIDYYGKKGILKRVDGSQGIDNVVAEVLGILGWSDK

SEQ ID NO: 457 - DNA, 693 bp, synthetic construct
  misc_feature 1..693: note = Variant of adenylate kinase
  source 1..693: mol_type = other DNA
atgcaccatcatcaccatcacgggggctccggcatgatggcatatctggtgttcttaggtccgccgggcgcgggaaaaggtacccaatcgaaacgcattcaggaaaagactggcatcccacatattagcacgggcgatatcttccgtgacatcgtcaagaaacagaacgatgaactgggcaagaagattaaagaaatcatggagaaaggtgaactcgttccagatgaactgggtaatgcggtagtaaaacgccgcctgtcggagaaagactgcgaaaaaggctttattttggatggttatccgcgtaccgttgctcaagcggaattcctggatagttttcttgaatcccagaacaaacagttgacagccgccgtgctgttcaaagtccccgaagatgttgttgtgcaacgtttaacctctcgcctgatctgtccgaaatgcgggcgtatctacaacatgatttttctgccaccaaaagaagacgagctgtgtgacgattgcaaagtcaaattagtacagcgtgatgatgataaggaagaaacggttcgtcaccgcctgaaagtctaccttgagaagacccagccggtcattgactattatggcaagaaaggtattctcaaacgcgtagatgggtcgcaaggaatcgacaacgttgttgcagaagtcctggggattctgggttggagcgataag

SEQ ID NO: 458 - protein, 231 aa, synthetic construct
  REGION 1..231: note = Variant of adenylate kinase
MHHHHHHGGSGMMAYLVFLGPPGAGKGTQSKRIQEKTGIPHISTGDIFRDIVKKQNDELGKKIKEIMEKGELVPDELGNAVVKRRLSEKDCEKGFILDGYPRTVAQAEFLDSFLESQNKQLTAAVLFKVPEDVVVQRLTSRLICPKCGRIYNMIFLPPKEDELCDDCKVKLVQRDDDKEETVRHRLKVYLEKTQPVIDYYGKKGILKRVDGSQGIDNVVAEVLGILGWSDK

SEQ ID NO: 459 - DNA, 693 bp, synthetic construct
  misc_feature 1..693: note = Variant of adenylate kinase
  source 1..693: mol_type = other DNA
atgcaccatcatcaccatcacgggggctccggcatgatggcatatctggtgttcttaggtccgccgggcgcgggaaaaggtacccaatcgaaacgcattcaggaaaagactggcatcccacatattagcacgggcgatatcttccgtgacatcgtcaagaaagagaacgatgaactgggcaagaagattaaagaaatcatggagaaaggtgaactcgttccagatgaactgggtaatgcggtagtaaaacgccgcctgtcggagaaagactgcgaaaaaggctttattttggatggttatccgcgtaccgttgctcaagcggaattcctggatagttttcttgaatcccagaacaaacagttgacagccgccgtgctgttcaaagtccccgaagatgaggttgtgcaacgtttaacctctcgcctgatctgtccgaaatgcgggcgtatctacaacatgatttttctgccaccaaaagaagacgagctgtgtgacgattgcaaagtcaaattagtacagcgtgatgatgataaggaagaaacggttcgtcaccgcctgaaagtctaccttgagaagacccagccggtcattgactattatggcaagaaaggtattctcaaacgcgtagatgggtcgcaaggaatcgacaacgttgttgcagaagtcctggggattctgggttggagcgataag

SEQ ID NO: 460 - protein, 231 aa, synthetic construct
  REGION 1..231: note = Variant of adenylate kinase
MHHHHHHGGSGMMAYLVFLGPPGAGKGTQSKRIQEKTGIPHISTGDIFRDIVKKENDELGKKIKEIMEKGELVPDELGNAVVKRRLSEKDCEKGFILDGYPRTVAQAEFLDSFLESQNKQLTAAVLFKVPEDEVVQRLTSRLICPKCGRIYNMIFLPPKEDELCDDCKVKLVQRDDDKEETVRHRLKVYLEKTQPVIDYYGKKGILKRVDGSQGIDNVVAEVLGILGWSDK

SEQ ID NO: 461 - DNA, 693 bp, synthetic construct
  misc_feature 1..693: note = Variant of adenylate kinase
  source 1..693: mol_type = other DNA
atgcaccatcatcaccatcacgggggctccggcatgatggcatatctggtgttcttaggtccgccgggcgcgggaaaaggtacccaatcgaaacgcattcaggaaaagactggcatcccacatattagcacgggcgatatcttccgtgacatcgtcaagaaagagaacgatgaactgggccctaagattaaagaaatcatggagaaaggtgaactcgttccagatgaactgggtaatgcggtagtaaaacgccgcctgtcggagaaagactgcgaaaaaggctttattttggatggttatccgcgtaccgttgctcaagcggaattcctggatagttttcttgaatcccagaacaaacagttgacagccgccgtgctgttcaaagtccccgaagatgttgttgtgcaacgtttaacctctcgcctgatctgtccgaaatgcgggcgtatctacaacatgatttttctgccaccaaaagaagacgagctgtgtgacgattgcaaagtcaaattagtacagcgtgatgatgataaggaagaaacggttcgtcaccgcctgaaagtctaccttgagaagacccagccggtcattgactattatggcaagaaaggtattctcaaacgcgtagatgggtcgcaaggaatcgacaacgttgttgcagaagtcctggggattctgggttggagcgataag

SEQ ID NO: 462 - protein, 231 aa, synthetic construct
  REGION 1..231: note = Variant of adenylate kinase
MHHHHHHGGSGMMAYLVFLGPPGAGKGTQSKRIQEKTGIPHISTGDIFRDIVKKENDELGPKIKEIMEKGELVPDELGNAVVKRRLSEKDCEKGFILDGYPRTVAQAEFLDSFLESQNKQLTAAVLFKVPEDVVVQRLTSRLICPKCGRIYNMIFLPPKEDELCDDCKVKLVQRDDDKEETVRHRLKVYLEKTQPVIDYYGKKGILKRVDGSQGIDNVVAEVLGILGWSDK

SEQ ID NO: 463 - DNA, 693 bp, synthetic construct
  misc_feature 1..693: note = Variant of adenylate kinase
  source 1..693: mol_type = other DNA
atgcaccatcatcaccatcacgggggctccggcatgatggcatatctggtgttcttaggtccgccgggcgcgggaaaaggtacccaatcgaaacgcattcaggaaaagactggcatcccacatattagcacgggcgatatcttccgtgacatcgtcaagaaagagaacgatgaaatgggcaagaagattaaagaaatcatggagaaaggtgaactcgttccagatgaactgggtaatgcggtagtaaaacgccgcctgtcggagaaagactgcgaaaaaggctttattttggatggttatccgcgtaccgttgctcaagcggaattcctggatagttttcttgaatcccagaacaaacagttgacagccgccgtgctgttcaaagtccccgaagatgttgttgtgcaacgtttaacctctcgcctgatctgtccgaaatgcgggcgtatctacaacatgatttttctgccaccaaaagaagacgagctgtgtgacgattgcaaagtcaaattagtacagcgtgatgatgataaggaagaaacggttcgtcaccgcctgaaagtctaccttgagaagacccagccggtcattgactattatggcaagaaaggtattctcaaacgcgtagatgggtcgcaaggaatcgacaacgttgttgcagaagtcctggggattctgggttggagcgataag

SEQ ID NO: 464 - protein, 231 aa, synthetic construct
  REGION 1..231: note = Variant of adenylate kinase
MHHHHHHGGSGMMAYLVFLGPPGAGKGTQSKRIQEKTGIPHISTGDIFRDIVKKENDEMGKKIKEIMEKGELVPDELGNAVVKRRLSEKDCEKGFILDGYPRTVAQAEFLDSFLESQNKQLTAAVLFKVPEDVVVQRLTSRLICPKCGRIYNMIFLPPKEDELCDDCKVKLVQRDDDKEETVRHRLKVYLEKTQPVIDYYGKKGILKRVDGSQGIDNVVAEVLGILGWSDK

SEQ ID NO: 465 - DNA, 693 bp, synthetic construct
  misc_feature 1..693: note = Variant of adenylate kinase
  source 1..693: mol_type = other DNA
atgcaccatcatcaccatcacgggggctccggcatgggtgcatatctggtgttcttaggtccgccgggcgcgggaaaaggtacccaatcgaaacgcattcaggaaaagactggcatcccacatattagcacgggcgatatcttccgtgacatcgtcaagaaagagaacgatgaactgggcaagaagattaaagaaatcatggagaaaggtgaactcgttccagatgaactgggtaatgcggtagtaaaacgccgcctgtcggagaaagactgcgaaaaaggctttattttggatggttatccgcgtaccgttgctcaagcggaattcctggatagttttcttgaatcccagaacaaacagttgacagccgccgtgctgttcaaagtccccgaagatgttgttgtgcaacgtttaacctctcgcctgatctgtccgaaatgcgggcgtatctacaacatgatttttctgccaccaaaagaagacgagctgtgtgacgattgcaaagtcaaattagtacagcgtgatgatgataaggaagaaacggttcgtcaccgcctgaaagtctaccttgagaagacccagccggtcattgactattatggcaagaaaggtattctcaaacgcgtagatgggtcgcaaggaatcgacaacgttgttgcagaagtcctggggattctgggttggagcgataag

SEQ ID NO: 466 - protein, 231 aa, synthetic construct
  REGION 1..231: note = Variant of adenylate kinase
MHHHHHHGGSGMGAYLVFLGPPGAGKGTQSKRIQEKTGIPHISTGDIFRDIVKKENDELGKKIKEIMEKGELVPDELGNAVVKRRLSEKDCEKGFILDGYPRTVAQAEFLDSFLESQNKQLTAAVLFKVPEDVVVQRLTSRLICPKCGRIYNMIFLPPKEDELCDDCKVKLVQRDDDKEETVRHRLKVYLEKTQPVIDYYGKKGILKRVDGSQGIDNVVAEVLGILGWSDK

SEQ ID NO: 467 - DNA, 693 bp, synthetic construct
  misc_feature 1..693: note = Variant of adenylate kinase
  source 1..693: mol_type = other DNA
atgcaccatcatcaccatcacgggggctccggcatgatggcatatctggtgttcttaggtccgccgggcgcgggaaaaggtacccaatcgaaacgcattcaggaaaagactggcatcccacatattagcacgggcgatatcttccgtgacatcgtcgctaaagagaacgatgaactgggcaagaagattaaagaaatcatggagaaaggtgaactcgttccagatgaactgggtaatgcggtagtaaaacgccgcctgtcggagaaagactgcgaaaaaggctttattttggatggttatccgcgtaccgttgctcaagcggaattcctggatagttttcttgaatcccagaacaaacagttgacagccgccgtgctgttcaaagtccccgaagatgttgttgtgcaacgtttaacctctcgcctgatctgtccgaaatgcgggcgtatctacaacatgatttttctgccaccaaaagaagacgagctgtgtgacgattgcaaagtcaaattagtacagcgtgatgatgataaggaagaaacggttcgtcaccgcctgaaagtctaccttgagaagacccagccggtcattgactattatggcaagaaaggtattctcaaacgcgtagatgggtcgcaaggaatcgacaacgttgttgcagaagtcctggggattctgggttggagcgataag

SEQ ID NO: 468 - protein, 231 aa, synthetic construct
  REGION 1..231: note = Variant of adenylate kinase
MHHHHHHGGSGMMAYLVFLGPPGAGKGTQSKRIQEKTGIPHISTGDIFRDIVAKENDELGKKIKEIMEKGELVPDELGNAVVKRRLSEKDCEKGFILDGYPRTVAQAEFLDSFLESQNKQLTAAVLFKVPEDVVVQRLTSRLICPKCGRIYNMIFLPPKEDELCDDCKVKLVQRDDDKEETVRHRLKVYLEKTQPVIDYYGKKGILKRVDGSQGIDNVVAEVLGILGWSDK

SEQ ID NO: 469 - DNA, 693 bp, synthetic construct
  misc_feature 1..693: note = Variant of adenylate kinase
  source 1..693: mol_type = other DNA
atgcaccatcatcaccatcacgggggctccggcatgatggcatatctggtgttcttaggtccgccgggcgcgggaaaaggtacccaatcgaaacgcattcaggaaaagactggcatcccacatattagcacgggcgatatcttccgtgacatcgtcaagaaagagaacgatgaactgggcaagaagattaaagaaatcatggagaaaggtgaactcgttccagatgaactgggtaatgcggtagtaaaacgccgcctgtcggagaaagactgcgaaaaaggctttattttggatggttatccgcgtaccgttgctcaagcggaattcctggatagttttcttgaatcccagaacaaacagttgacagccgccgtgctgttcaaagtccccgaagatgttgttgtgcaacgtttaacctctcgcctgatctgtccgaaatgcgggcgtatctacaacatgatttttctgccaccaaaagaagacgagctgtgtgacgattgcaaagtcaaattagtacagcgtgatgatgataaggaagaaacggttcgtcaccgcctgaaagtctacgcggagaagacccagccggtcattgactattatggcaagaaaggtattctcaaacgcgtagatgggtcgcaaggaatcgacaacgttgttgcagaagtcctggggattctgggttggagcgataag

SEQ ID NO: 470 - protein, 231 aa, synthetic construct
  REGION 1..231: note = Variant of adenylate kinase
MHHHHHHGGSGMMAYLVFLGPPGAGKGTQSKRIQEKTGIPHISTGDIFRDIVKKENDELGKKIKEIMEKGELVPDELGNAVVKRRLSEKDCEKGFILDGYPRTVAQAEFLDSFLESQNKQLTAAVLFKVPEDVVVQRLTSRLICPKCGRIYNMIFLPPKEDELCDDCKVKLVQRDDDKEETVRHRLKVYAEKTQPVIDYYGKKGILKRVDGSQGIDNVVAEVLGILGWSDK

SEQ ID NO: 471 - DNA, 693 bp, synthetic construct
  misc_feature 1..693: note = Variant of adenylate kinase
  source 1..693: mol_type = other DNA
atgcaccatcatcaccatcacgggggctccggcatgatggcatatctggtgttcttaggtccgccgggcgcgggaaaaggtacccaatcgaaacgcattcaggaaaagactggcatcccacatattagcacgggcgatatcttccgtgacatcgtcaagaaagagaactcggaactgggcaagaagattaaagaaatcatggagaaaggtgaactcgttccagatgaactgggtaatgcggtagtaaaacgccgcctgtcggagaaagactgcgaaaaaggctttattttggatggttatccgcgtaccgttgctcaagcggaattcctggatagttttcttgaatcccagaacaaacagttgacagccgccgtgctgttcaaagtccccgaagatgttgttgtgcaacgtttaacctctcgcctgatctgtccgaaatgcgggcgtatctacaacatgatttttctgccaccaaaagaagacgagctgtgtgacgattgcaaagtcaaattagtacagcgtgatgatgataaggaagaaacggttcgtcaccgcctgaaagtctaccttgagaagacccagccggtcattgactattatggcaagaaaggtattctcaaacgcgtagatgggtcgcaaggaatcgacaacgttgttgcagaagtcctggggattctgggttggagcgataag

SEQ ID NO: 472 - protein, 231 aa, synthetic construct
  REGION 1..231: note = Variant of adenylate kinase
MHHHHHHGGSGMMAYLVFLGPPGAGKGTQSKRIQEKTGIPHISTGDIFRDIVKKENSELGKKIKEIMEKGELVPDELGNAVVKRRLSEKDCEKGFILDGYPRTVAQAEFLDSFLESQNKQLTAAVLFKVPEDVVVQRLTSRLICPKCGRIYNMIFLPPKEDELCDDCKVKLVQRDDDKEETVRHRLKVYLEKTQPVIDYYGKKGILKRVDGSQGIDNVVAEVLGILGWSDK

SEQ ID NO: 473 - DNA, 693 bp, synthetic construct
  misc_feature 1..693: note = Variant of adenylate kinase
  source 1..693: mol_type = other DNA
atgcaccatcatcaccatcacgggggctccggcatgatggcatatctggtgttcttaggtccgccgggcgcgggaaaaggtacccaatcgaaacgcattcaggaaaagactggcatcccacatattagcacgggcgatatcttccgtgacatcgtcaagaaagagaacgatgaactgggcaaggcgattaaagaaatcatggagaaaggtgaactcgttccagatgaactgggtaatgcggtagtaaaacgccgcctgtcggagaaagactgcgaaaaaggctttattttggatggttatccgcgtaccgttgctcaagcggaattcctggatagttttcttgaatcccagaacaaacagttgacagccgccgtgctgttcaaagtccccgaagatgttgttgtgcaacgtttaacctctcgcctgatctgtccgaaatgcgggcgtatctacaacatgatttttctgccaccaaaagaagacgagctgtgtgacgattgcaaagtcaaattagtacagcgtgatgatgataaggaagaaacggttcgtcaccgcctgaaagtctaccttgagaagacccagccggtcattgactattatggcaagaaaggtattctcaaacgcgtagatgggtcgcaaggaatcgacaacgttgttgcagaagtcctggggattctgggttggagcgataag

SEQ ID NO: 474 - protein, 231 aa, synthetic construct
  REGION 1..231: note = Variant of adenylate kinase
MHHHHHHGGSGMMAYLVFLGPPGAGKGTQSKRIQEKTGIPHISTGDIFRDIVKKENDELGKAIKEIMEKGELVPDELGNAVVKRRLSEKDCEKGFILDGYPRTVAQAEFLDSFLESQNKQLTAAVLFKVPEDVVVQRLTSRLICPKCGRIYNMIFLPPKEDELCDDCKVKLVQRDDDKEETVRHRLKVYLEKTQPVIDYYGKKGILKRVDGSQGIDNVVAEVLGILGWSDK

SEQ ID NO: 475 - DNA, 693 bp, synthetic construct
  misc_feature 1..693: note = Variant of adenylate kinase
  source 1..693: mol_type = other DNA
atgcaccatcatcaccatcacgggggctccggcatgatggcatatctggtgttcttaggtccgccgggcgcgggaaaaggtacccaatcgaaacgcattcaggaaaagactggcatcccacatattagcacgggcgatatcttccgtgacatcgtcaagaaagagaacgatgaactgggcaagaagattaaagaaatcatggagaaaggtgaactcgttccagatgaactgggtaatgcggtagtaaaacgccgcctgtcggagaaagactgcgaaaaaggctttattttggatggttatccgcgtaccgttgctcaagcggaattcctggatagttttcttgaatcccagaacaaacagttgacagccgccgtgctgttcaaagtccccgaagatgttgttgtgcaacgtttaacctctcgcctgatctgtccgaaatgcgggcgtatctacaacatgatttttctgccaccaaaagaagacgagctgtgtgacgattgcaaagtcaaattagtacagcgtgatgatgataaggaagaagtggttcgtcaccgcctgaaagtctaccttgagaagacccagccggtcattgactattatggcaagaaaggtattctcaaacgcgtagatgggtcgcaaggaatcgacaacgttgttgcagaagtcctggggattctgggttggagcgataag

SEQ ID NO: 476 - protein, 231 aa, synthetic construct
  REGION 1..231: note = Variant of adenylate kinase
MHHHHHHGGSGMMAYLVFLGPPGAGKGTQSKRIQEKTGIPHISTGDIFRDIVKKENDELGKKIKEIMEKGELVPDELGNAVVKRRLSEKDCEKGFILDGYPRTVAQAEFLDSFLESQNKQLTAAVLFKVPEDVVVQRLTSRLICPKCGRIYNMIFLPPKEDELCDDCKVKLVQRDDDKEEVVRHRLKVYLEKTQPVIDYYGKKGILKRVDGSQGIDNVVAEVLGILGWSDK

SEQ ID NO: 477 - DNA, 693 bp, synthetic construct
  misc_feature 1..693: note = Variant of adenylate kinase
  source 1..693: mol_type = other DNA
atgcaccatcatcaccatcacgggggctccggcatgatggcatatctggtgttcttaggtccgccgggcgcgggaaaaggtacccaatcgaaacgcattcaggaaaagactggcatcccacatattagcacgggcgatatcttccgtgacatcgtcaagaaagggaacgatgaactgggcaagaagattaaagaaatcatggagaaaggtgaactcgttccagatgaactgggtaatgcggtagtaaaacgccgcctgtcggagaaagactgcgaaaaaggctttattttggatggttatccgcgtaccgttgctcaagcggaattcctggatagttttcttgaatcccagaacaaacagttgacagccgccgtgctgttcaaagtccccgaagatgttgttgtgcaacgtttaacctctcgcctgatctgtccgaaatgcgggcgtatctacaacatgatttttctgccaccaaaagaagacgagctgtgtgacgattgcaaagtcaaattagtacagcgtgatgatgataaggaagaaacggttcgtcaccgcctgaaagtctaccttgagaagacccagccggtcattgactattatggcaagaaaggtattctcaaacgcgtagatgggtcgcaaggaatcgacaacgttgttgcagaagtcctggggattctgggttggagcgataag

SEQ ID NO: 478 - protein, 231 aa, synthetic construct
  REGION 1..231: note = Variant of adenylate kinase
MHHHHHHGGSGMMAYLVFLGPPGAGKGTQSKRIQEKTGIPHISTGDIFRDIVKKGNDELGKKIKEIMEKGELVPDELGNAVVKRRLSEKDCEKGFILDGYPRTVAQAEFLDSFLESQNKQLTAAVLFKVPEDVVVQRLTSRLICPKCGRIYNMIFLPPKEDELCDDCKVKLVQRDDDKEETVRHRLKVYLEKTQPVIDYYGKKGILKRVDGSQGIDNVVAEVLGILGWSDK

SEQ ID NO: 479 - DNA, 693 bp, synthetic construct
  misc_feature 1..693: note = Variant of adenylate kinase
  source 1..693: mol_type = other DNA
atgcaccatcatcaccatcacgggggctccggcatgatggcatatctggtgttcttaggtccgccgggcgcgggaaaaggtacccaatcgaaacgcattcaggaaaagactggcatcccacatattagcacgggcgatatcttccgtgacatcgtcaagaaagagaacgatgaactgggcaagaagattaaagaaatcatggagaaaggtgaactcgttccagatgaactgggtaatgcggtagtaaaacgccgcctgtcggagaaagactgcgaaaaaggctttattttggatggttatccgcgtaccgttgctcaagcggaattcctggatagttttcttgaatcccagaacaaacagttgacagccgccgtgctgttcaaagtccccgaagatgttgttgtgcaacgtttaacctctcgcctgatctgtccgaaatgcgggcgtatctacaacatgatttttctgccaccaaaagaagacgagctgtgtgacgattgcggggtcaaattagtacagcgtgatgatgataaggaagaaacggttcgtcaccgcctgaaagtctaccttgagaagacccagccggtcattgactattatggcaagaaaggtattctcaaacgcgtagatgggtcgcaaggaatcgacaacgttgttgcagaagtcctggggattctgggttggagcgataag

SEQ ID NO: 480 - protein, 231 aa, synthetic construct
  REGION 1..231: note = Variant of adenylate kinase
MHHHHHHGGSGMMAYLVFLGPPGAGKGTQSKRIQEKTGIPHISTGDIFRDIVKKENDELGKKIKEIMEKGELVPDELGNAVVKRRLSEKDCEKGFILDGYPRTVAQAEFLDSFLESQNKQLTAAVLFKVPEDVVVQRLTSRLICPKCGRIYNMIFLPPKEDELCDDCGVKLVQRDDDKEETVRHRLKVYLEKTQPVIDYYGKKGILKRVDGSQGIDNVVAEVLGILGWSDK

SEQ ID NO: 481 - DNA, 693 bp, synthetic construct
  misc_feature 1..693: note = Variant of adenylate kinase
  source 1..693: mol_type = other DNA
atgcaccatcatcaccatcacgggggctccggcatgatggcatatctggtgttcttaggtccgccgggcgcgggaaaaggtacccaatcgaaacgcattcaggaaaagactggcatcccacatattagcacgggcgatatcttccgtgacatcgtcaagcgggagaacgatgaactgggcaagaagattaaagaaatcatggagaaaggtgaactcgttccagatgaactgggtaatgcggtagtaaaacgccgcctgtcggagaaagactgcgaaaaaggctttattttggatggttatccgcgtaccgttgctcaagcggaattcctggatagttttcttgaatcccagaacaaacagttgacagccgccgtgctgttcaaagtccccgaagatgttgttgtgcaacgtttaacctctcgcctgatctgtccgaaatgcgggcgtatctacaacatgatttttctgccaccaaaagaagacgagctgtgtgacgattgcaaagtcaaattagtacagcgtgatgatgataaggaagaaacggttcgtcaccgcctgaaagtctaccttgagaagacccagccggtcattgactattatggcaagaaaggtattctcaaacgcgtagatgggtcgcaaggaatcgacaacgttgttgcagaagtcctggggattctgggttggagcgataag

SEQ ID NO: 482 - protein, 231 aa, synthetic construct
  REGION 1..231: note = Variant of adenylate kinase
MHHHHHHGGSGMMAYLVFLGPPGAGKGTQSKRIQEKTGIPHISTGDIFRDIVKRENDELGKKIKEIMEKGELVPDELGNAVVKRRLSEKDCEKGFILDGYPRTVAQAEFLDSFLESQNKQLTAAVLFKVPEDVVVQRLTSRLICPKCGRIYNMIFLPPKEDELCDDCKVKLVQRDDDKEETVRHRLKVYLEKTQPVIDYYGKKGILKRVDGSQGIDNVVAEVLGILGWSDK

SEQ ID NO: 483 - DNA, 693 bp, synthetic construct
  misc_feature 1..693: note = Variant of adenylate kinase
  source 1..693: mol_type = other DNA
atgcaccatcatcaccatcacgggggctccggcatgatggcatatctggtgttcttaggtccgccgggcgcgggaaaaggtacccaatcgaaacgcattcaggaaaagactggcatcccacatattagcacgggcgatatcttccgtgacatcgtcaagcaggagaacgatgaactgggcaagaagattaaagaaatcatggagaaaggtgaactcgttccagatgaactgggtaatgcggtagtaaaacgccgcctgtcggagaaagactgcgaaaaaggctttattttggatggttatccgcgtaccgttgctcaagcggaattcctggatagttttcttgaatcccagaacaaacagttgacagccgccgtgctgttcaaagtccccgaagatgttgttgtgcaacgtttaacctctcgcctgatctgtccgaaatgcgggcgtatctacaacatgatttttctgccaccaaaagaagacgagctgtgtgacgattgcaaagtcaaattagtacagcgtgatgatgataaggaagaaacggttcgtcaccgcctgaaagtctaccttgagaagacccagccggtcattgactattatggcaagaaaggtattctcaaacgcgtagatgggtcgcaaggaatcgacaacgttgttgcagaagtcctggggattctgggttggagcgataag

SEQ ID NO: 484 - protein, 231 aa, synthetic construct
  REGION 1..231: note = Variant of adenylate kinase
MHHHHHHGGSGMMAYLVFLGPPGAGKGTQSKRIQEKTGIPHISTGDIFRDIVKQENDELGKKIKEIMEKGELVPDELGNAVVKRRLSEKDCEKGFILDGYPRTVAQAEFLDSFLESQNKQLTAAVLFKVPEDVVVQRLTSRLICPKCGRIYNMIFLPPKEDELCDDCKVKLVQRDDDKEETVRHRLKVYLEKTQPVIDYYGKKGILKRVDGSQGIDNVVAEVLGILGWSDK

SEQ ID NO: 485 - DNA, 693 bp, synthetic construct
  misc_feature 1..693: note = Variant of adenylate kinase
  source 1..693: mol_type = other DNA
atgcaccatcatcaccatcacgggggctccggcatgatggcatatctggtgttcttaggtccgccgggcgcgggaaaaggtacccaatcgaaacgcattcaggaaaagactggcatcccacatattagcacgggcgatatcttccgtgacatcgtcaagaaagagaacgatgaactgggcaagaagattaaagaaatcatggagaaaggtgaactcgttccagatgaactgggtaatgcggtagtaaaacgccgcctgtcggagaaagactgcgaaaaaggctttattttggatggttatccgcgtaccgttgctcaagcggaattcctggatagttttcttgaatcccagaacaaacagttgacagccgccgtgctgttcaaagtccccgaagatgttgttgtgcaacgtttaacctctcgcctgatctgtccgaaatgcgggcgtatctacaacatgatttttctgccaccaaaagaagacgagctgtgtgacgattgcaaagtcaaattagtacgtcgtgatgatgataaggaagaaacggttcgtcaccgcctgaaagtctaccttgagaagacccagccggtcattgactattatggcaagaaaggtattctcaaacgcgtagatgggtcgcaaggaatcgacaacgttgttgcagaagtcctggggattctgggttggagcgataag

SEQ ID NO: 486 - protein, 231 aa, synthetic construct
  REGION 1..231: note = Variant of adenylate kinase
MHHHHHHGGSGMMAYLVFLGPPGAGKGTQSKRIQEKTGIPHISTGDIFRDIVKKENDELGKKIKEIMEKGELVPDELGNAVVKRRLSEKDCEKGFILDGYPRTVAQAEFLDSFLESQNKQLTAAVLFKVPEDVVVQRLTSRLICPKCGRIYNMIFLPPKEDELCDDCKVKLVRRDDDKEETVRHRLKVYLEKTQPVIDYYGKKGILKRVDGSQGIDNVVAEVLGILGWSDK

SEQ ID NO: 487 - DNA, 693 bp, synthetic construct
  misc_feature 1..693: note = Variant of adenylate kinase
  source 1..693: mol_type = other DNA
atgcaccatcatcaccatcacgggggctccggcatgatggcatatctggtgttcttaggtccgccgggcgcgggaaaaggtacccaatcgaaacgcattcaggaaaagactggcatcccacatattagcacgggcgatatcttccgtgacatcgtcaagaaagagaacgatgaactgggcaagaagattaaagaaatcatggagaaaggtgaactcgttccagatgaactgggtaatgcggtagtaaaacgccgcctgtcggagaaagactgcgaaaaaggctttattttggatggttatccgcgtaccgttgctcaagcggaattcctggatagttttcttgaatcccagaacaaacagttgacagccgccgtgctgttcaaagtccccgaagatgttgttgtgcaacgtttaacctctcgcctgatctgtccgaaatgcgggcgtatctacaacatgatttttctgccaccaaaagaagacgagctgtgtgacgattgccaggtcaaattagtacagcgtgatgatgataaggaagaaacggttcgtcaccgcctgaaagtctaccttgagaagacccagccggtcattgactattatggcaagaaaggtattctcaaacgcgtagatgggtcgcaaggaatcgacaacgttgttgcagaagtcctggggattctgggttggagcgataag

SEQ ID NO: 488 - protein, 231 aa, synthetic construct
  REGION 1..231: note = Variant of adenylate kinase
MHHHHHHGGSGMMAYLVFLGPPGAGKGTQSKRIQEKTGIPHISTGDIFRDIVKKENDELGKKIKEIMEKGELVPDELGNAVVKRRLSEKDCEKGFILDGYPRTVAQAEFLDSFLESQNKQLTAAVLFKVPEDVVVQRLTSRLICPKCGRIYNMIFLPPKEDELCDDCQVKLVQRDDDKEETVRHRLKVYLEKTQPVIDYYGKKGILKRVDGSQGIDNVVAEVLGILGWSDK

SEQ ID NO: 489 - DNA, 693 bp, synthetic construct
  misc_feature 1..693: note = Variant of adenylate kinase
  source 1..693: mol_type = other DNA
atgcaccatcatcaccatcacgggggctccggcatgatggcatatctggtgttcttaggtccgccgggcgcgggaaaaggtacccaatcgaaacgcattcaggaaaagactggcatcccacatattagcacgggcgatatcttccgtgacatcgtcaagaaagagaacgatgaactgggcaagaagattaaagaaatcatggagaaaggtgaactcgttccagatgaactgggtaatgcggtagtaaaacgccgcctgtcggagaaagactgcgaaaaaggctttattttggatggttatccgcgtaccgttgctcaagcggaattcctggatagttttcttgaatcccagaacaaacagttgacagccgccgtgctgttcaaagtccccgaagatgttgttgtgcaacgtttaacctctcgcctgatctgtccgaaatgcgggcgtatctacaacatgatttttctgccaccaaaagaagacgagctgtgtgacgattgcaatgtcaaattagtacagcgtgatgatgataaggaagaaacggttcgtcaccgcctgaaagtctaccttgagaagacccagccggtcattgactattatggcaagaaaggtattctcaaacgcgtagatgggtcgcaaggaatcgacaacgttgttgcagaagtcctggggattctgggttggagcgataag

SEQ ID NO: 490 - protein, 231 aa, synthetic construct
  REGION 1..231: note = Variant of adenylate kinase
MHHHHHHGGSGMMAYLVFLGPPGAGKGTQSKRIQEKTGIPHISTGDIFRDIVKKENDELGKKIKEIMEKGELVPDELGNAVVKRRLSEKDCEKGFILDGYPRTVAQAEFLDSFLESQNKQLTAAVLFKVPEDVVVQRLTSRLICPKCGRIYNMIFLPPKEDELCDDCNVKLVQRDDDKEETVRHRLKVYLEKTQPVIDYYGKKGILKRVDGSQGIDNVVAEVLGILGWSDK

SEQ ID NO: 491 - DNA, 693 bp, synthetic construct
  misc_feature 1..693: note = Variant of adenylate kinase
  source 1..693: mol_type = other DNA
atgcaccatcatcaccatcacgggggctccggcatgatggcatatctggtgttcttaggtccgccgggcgcgggaaaaggtacccaatcgaaacgcattcaggaaaagactggcatcccacatattagcacgggcgatatcttccgtgacatcgtcaagaaagagaacgatgaactgggcaagaagattaaagaaatcatggagaaaggtgaactcgttccagatgaactgggtaatgcggtagtaaaacgccgcctgtcggagaaagactgcgaaaaaggctttattttggatggttatccgcgtaccgttgctcaagcggaattcctggatagttttcttgaatcccagaacaaacagttgacagccgccgtgctgttcaaagtccccgaagatgttgttgtgcaacgtttaacctctcgcctgatctgtccgaaatgcgggcgtatctacaacatgatttttctgccaccaaaagaagacgagctgtgtgacgattgcaaagtcccgttagtacagcgtgatgatgataaggaagaaacggttcgtcaccgcctgaaagtctaccttgagaagacccagccggtcattgactattatggcaagaaaggtattctcaaacgcgtagatgggtcgcaaggaatcgacaacgttgttgcagaagtcctggggattctgggttggagcgataag

SEQ ID NO: 492 - protein, 231 aa, synthetic construct
  REGION 1..231: note = Variant of adenylate kinase
MHHHHHHGGSGMMAYLVFLGPPGAGKGTQSKRIQEKTGIPHISTGDIFRDIVKKENDELGKKIKEIMEKGELVPDELGNAVVKRRLSEKDCEKGFILDGYPRTVAQAEFLDSFLESQNKQLTAAVLFKVPEDVVVQRLTSRLICPKCGRIYNMIFLPPKEDELCDDCKVPLVQRDDDKEETVRHRLKVYLEKTQPVIDYYGKKGILKRVDGSQGIDNVVAEVLGILGWSDK

SEQ ID NO: 493 - DNA, 693 bp, synthetic construct
  misc_feature 1..693: note = Variant of adenylate kinase
  source 1..693: mol_type = other DNA
atgcaccatcatcaccatcacgggggctccggcatgatggcatatctggtgttcttaggtccgccgggcgcgggaaaaggtacccaatcgaaacgcattgttgaaaagactggcatcccacatattagcacgggcgatatcttccgtgacatcgtcaagaaagagaacgatgaactgggcaagaagattaaagaaatcatggagaaaggtgaactcgttccagatgaactgggtaatgcggtagtaaaacgccgcctgtcggagaaagactgcgaaaaaggctttattttggatggttatccgcgtaccgttgctcaagcggaattcctggatagttttcttgaatcccagaacaaacagttgacagccgccgtgctgttcaaagtccccgaagatgttgttgtgcaacgtttaacctctcgcctgatctgtccgaaatgcgggcgtatctacaacatgatttttctgccaccaaaagaagacgagctgtgtgacgattgcaaagtcaaattagtacagcgtgatgatgataaggaagaaacggttcgtcaccgcctgaaagtctaccttgagaagacccagccggtcattgactattatggcaagaaaggtattctcaaacgcgtagatgggtcgcaaggaatcgacaacgttgttgcagaagtcctggggattctgggttggagcgataag

SEQ ID NO: 494 - protein, 231 aa, synthetic construct
  REGION 1..231: note = Variant of adenylate kinase
MHHHHHHGGSGMMAYLVFLGPPGAGKGTQSKRIVEKTGIPHISTGDIFRDIVKKENDELGKKIKEIMEKGELVPDELGNAVVKRRLSEKDCEKGFILDGYPRTVAQAEFLDSFLESQNKQLTAAVLFKVPEDVVVQRLTSRLICPKCGRIYNMIFLPPKEDELCDDCKVKLVQRDDDKEETVRHRLKVYLEKTQPVIDYYGKKGILKRVDGSQGIDNVVAEVLGILGWSDK

SEQ ID NO: 495 - DNA, 693 bp, synthetic construct
  misc_feature 1..693: note = Variant of adenylate kinase
  source 1..693: mol_type = other DNA
atgcaccatcatcaccatcacgggggctccggcatgatggcatatctggtgttcttaggtccgccgggcgcgggaaaaggtacccaatcgaaacgcattcaggaaaagactggcatcccacatattagcacgggcgatatcttccgtgacatcgtcaagaaagagaacgatgaacatggcaagaagattaaagaaatcatggagaaaggtgaactcgttccagatgaactgggtaatgcggtagtaaaacgccgcctgtcggagaaagactgcgaaaaaggctttattttggatggttatccgcgtaccgttgctcaagcggaattcctggatagttttcttgaatcccagaacaaacagttgacagccgccgtgctgttcaaagtccccgaagatgttgttgtgcaacgtttaacctctcgcctgatctgtccgaaatgcgggcgtatctacaacatgatttttctgccaccaaaagaagacgagctgtgtgacgattgcaaagtcaaattagtacagcgtgatgatgataaggaagaaacggttcgtcaccgcctgaaagtctaccttgagaagacccagccggtcattgactattatggcaagaaaggtattctcaaacgcgtagatgggtcgcaaggaatcgacaacgttgttgcagaagtcctggggattctgggttggagcgataag

SEQ ID NO: 496 - protein, 231 aa, synthetic construct
  REGION 1..231: note = Variant of adenylate kinase
MHHHHHHGGSGMMAYLVFLGPPGAGKGTQSKRIQEKTGIPHISTGDIFRDIVKKENDEHGKKIKEIMEKGELVPDELGNAVVKRRLSEKDCEKGFILDGYPRTVAQAEFLDSFLESQNKQLTAAVLFKVPEDVVVQRLTSRLICPKCGRIYNMIFLPPKEDELCDDCKVKLVQRDDDKEETVRHRLKVYLEKTQPVIDYYGKKGILKRVDGSQGIDNVVAEVLGILGWSDK

SEQ ID NO: 497 - DNA, 693 bp, synthetic construct
  misc_feature 1..693: note = Variant of adenylate kinase
  source 1..693: mol_type = other DNA
atgcaccatcatcaccatcacgggggctccggcatgatggcatatctggtgttcttaggtccgccgggcgcgggaaaaggtacccaatcgaaacgcattcaggaaaagactggcatcccacatattagcacgggcgatatcttccgtgacatcgtcaagaaagagaacgatgaactgggcaagaagattaaagaaatcatggagaaaggtgaactcgttccagatgaactgggtaatgcggtagtaaaacgccgcctgtcggagaaagactgcgaaaaaggctttattttggatggttatccgcgtaccgttgctcaagcggaattcctggatagttttcttgaatcccagaacaaacagttgacagccgccgtgctgttcaaagtccccgaagatgttgttgtgcaacgtttaacctctcgcctgatctgtccgaaatgcgggcgtatctacaacatgatttttctgccaccaaaagaagacgagctgtgtgacgattgcaaagtcaaattagtacagcgtgatgatgataaggaagaaacggttttgcaccgcctgaaagtctaccttgagaagacccagccggtcattgactattatggcaagaaaggtattctcaaacgcgtagatgggtcgcaaggaatcgacaacgttgttgcagaagtcctggggattctgggttggagcgataag

SEQ ID NO: 498 - protein, 231 aa, synthetic construct
  REGION 1..231: note = Variant of adenylate kinase
MHHHHHHGGSGMMAYLVFLGPPGAGKGTQSKRIQEKTGIPHISTGDIFRDIVKKENDELGKKIKEIMEKGELVPDELGNAVVKRRLSEKDCEKGFILDGYPRTVAQAEFLDSFLESQNKQLTAAVLFKVPEDVVVQRLTSRLICPKCGRIYNMIFLPPKEDELCDDCKVKLVQRDDDKEETVLHRLKVYLEKTQPVIDYYGKKGILKRVDGSQGIDNVVAEVLGILGWSDK

SEQ ID NO: 499 - DNA, 693 bp, synthetic construct
  misc_feature 1..693: note = Variant of adenylate kinase
  source 1..693: mol_type = other DNA
atgcaccatcatcaccatcacgggggctccggcatgatggcatatctggtgttcttaggtccgccgggcgcgggaaaaggtacccaatcgaaacgcattcaggaaaagactggcatcccacatattagcacgggcgatatcttccgtgacatcgtcaagaaagagaacgatgaactgggcaagaagattaaagaaatcatggagaaaggtgaactcgttccagatgaactgggtaatgcggtagtaaaacgccgcctgtcggagaaagactgcgaaaaaggctttattttggatggttatccgcgtaccgttgctcaagcggaattcctggatagttttcttgaatcccagaacaaacagttgacagccgccgtgctgttcaaagtccccgaagatgttgttgtgcaacgtttaacctctcgcctgatctgtccgaaatgcgggcgtatctacaacatgatttttctgccaccaaaagaagacgagctgtgtgacgattgcaaagtcaaattagtaaagcgtgatgatgataaggaagaaacggttcgtcaccgcctgaaagtctaccttgagaagacccagccggtcattgactattatggcaagaaaggtattctcaaacgcgtagatgggtcgcaaggaatcgacaacgttgttgcagaagtcctggggattctgggttggagcgataag

SEQ ID NO: 500 - protein, 231 aa, synthetic construct
  REGION 1..231: note = Variant of adenylate kinase
MHHHHHHGGSGMMAYLVFLGPPGAGKGTQSKRIQEKTGIPHISTGDIFRDIVKKENDELGKKIKEIMEKGELVPDELGNAVVKRRLSEKDCEKGFILDGYPRTVAQAEFLDSFLESQNKQLTAAVLFKVPEDVVVQRLTSRLICPKCGRIYNMIFLPPKEDELCDDCKVKLVKRDDDKEETVRHRLKVYLEKTQPVIDYYGKKGILKRVDGSQGIDNVVAEVLGILGWSDK

SEQ ID NO: 501 - DNA, 693 bp, synthetic construct
  misc_feature 1..693: note = Variant of adenylate kinase
  source 1..693: mol_type = other DNA
atgcaccatcatcaccatcacgggggctccggcatgatggcatatctggtgttcttaggtccgccgggcgcgggaaaaggtacccaatcgaaacgcattcaggaaaagactggcatcccacatattagcacgggcgatatcttccgtgacatcgtcaagaaagagaacgatgaactgggcaagaagattaaagaaatcatggagaaaggtgaactcgttccagatgaactgggtaatgcggtagtaaaacgccgcctgtcggagaaagactgcgaaaaaggctttattttggatggttatccgcgtaccgttgctcaagcggaattcctggatagttttcttgaatcccagaacaaacagttgacagccgccgtgctgttcaaagtccccgaagatgttgttgtgcaacgtttaacctctcgcctgatctgtccgaaatgcgggcgtatctacaacatgatttttctgccaccaaaagaagacgagctgtgtgacgattgcaaagtcaaattagtacagcgtgatgatgataaggaagaaacggttgctcaccgcctgaaagtctaccttgagaagacccagccggtcattgactattatggcaagaaaggtattctcaaacgcgtagatgggtcgcaaggaatcgacaacgttgttgcagaagtcctggggattctgggttggagcgataag

SEQ ID NO: 502 - protein, 231 aa, synthetic construct
  REGION 1..231: note = Variant of adenylate kinase
MHHHHHHGGSGMMAYLVFLGPPGAGKGTQSKRIQEKTGIPHISTGDIFRDIVKKENDELGKKIKEIMEKGELVPDELGNAVVKRRLSEKDCEKGFILDGYPRTVAQAEFLDSFLESQNKQLTAAVLFKVPEDVVVQRLTSRLICPKCGRIYNMIFLPPKEDELCDDCKVKLVQRDDDKEETVAHRLKVYLEKTQPVIDYYGKKGILKRVDGSQGIDNVVAEVLGILGWSDK

SEQ ID NO: 503 - DNA, 693 bp, synthetic construct
  misc_feature 1..693: note = Variant of adenylate kinase
  source 1..693: mol_type = other DNA
atgcaccatcatcaccatcacgggggctccggcatgatggagtatctggtgttcttaggtccgccgggcgcgggaaaaggtacccaatcgaaacgcattcaggaaaagactggcatcccacatattagcacgggcgatatcttccgtgacatcgtcaagaaagagaacgatgaactgggcaagaagattaaagaaatcatggagaaaggtgaactcgttccagatgaactgggtaatgcggtagtaaaacgccgcctgtcggagaaagactgcgaaaaaggctttattttggatggttatccgcgtaccgttgctcaagcggaattcctggatagttttcttgaatcccagaacaaacagttgacagccgccgtgctgttcaaagtccccgaagatgttgttgtgcaacgtttaacctctcgcctgatctgtccgaaatgcgggcgtatctacaacatgatttttctgccaccaaaagaagacgagctgtgtgacgattgcaaagtcaaattagtacagcgtgatgatgataaggaagaaacggttcgtcaccgcctgaaagtctaccttgagaagacccagccggtcattgactattatggcaagaaaggtattctcaaacgcgtagatgggtcgcaaggaatcgacaacgttgttgcagaagtcctggggattctgggttggagcgataag

SEQ ID NO: 504 - protein, 231 aa, synthetic construct
  REGION 1..231: note = Variant of adenylate kinase
MHHHHHHGGSGMMEYLVFLGPPGAGKGTQSKRIQEKTGIPHISTGDIFRDIVKKENDELGKKIKEIMEKGELVPDELGNAVVKRRLSEKDCEKGFILDGYPRTVAQAEFLDSFLESQNKQLTAAVLFKVPEDVVVQRLTSRLICPKCGRIYNMIFLPPKEDELCDDCKVKLVQRDDDKEETVRHRLKVYLEKTQPVIDYYGKKGILKRVDGSQGIDNVVAEVLGILGWSDK

SEQ ID NO: 505 - DNA, 693 bp, synthetic construct
  misc_feature 1..693: note = Variant of adenylate kinase
  source 1..693: mol_type = other DNA
atgcaccatcatcaccatcacgggggctccggcatgatggcatatctggtgttcttaggtccgccgggcgcgggaaaaggtacccaatcgaaacgcattcaggaaaagactggcatcccgcatattagcacgggcgatatcttccgtgacatcgtcaagaaagagaacgatgaactggccaaggcgattaaagaaatcatggagaaaggtgaactcgttccagatgaactgggtaatgcggtagtaaaacgccgcctgtcggagaaagactgcgaaaaaggctttattttggatggttatccgcgtaccgtggctcaagcggaattcctggatagttttcttgaatcccagaacaaacagttgacagccgtggtgctgttcaaagtccccgaagatgttgttgtgcaacgtttaacctctcgcctgatctgtccgaaatgcgggcgtatctacaacatgatttttctgccaccaaaagaagacgagctgtgtgacgattgcaaagtcggcttagtacagcgtgatgatgataaggaagaaacggttcgtcaccgcctgaaagtctaccttgagaagacccagccggtcattgactattatggcaagaaaggtattctcaaacgcgtagatgggtcgcaaggaatcgacaacgttgttgcagaagtcctggggattctgggttggagcgataag

SEQ ID NO: 506 - protein, 231 aa, synthetic construct
  REGION 1..231: note = Variant of adenylate kinase
MHHHHHHGGSGMMAYLVFLGPPGAGKGTQSKRIQEKTGIPHISTGDIFRDIVKKENDELAKAIKEIMEKGELVPDELGNAVVKRRLSEKDCEKGFILDGYPRTVAQAEFLDSFLESQNKQLTAVVLFKVPEDVVVQRLTSRLICPKCGRIYNMIFLPPKEDELCDDCKVGLVQRDDDKEETVRHRLKVYLEKTQPVIDYYGKKGILKRVDGSQGIDNVVAEVLGILGWSDK

SEQ ID NO: 507 - DNA, 693 bp, synthetic construct
  misc_feature 1..693: note = Variant of adenylate kinase
  source 1..693: mol_type = other DNA
atgcaccatcatcaccatcacgggggctccggcatgatggcatatctggtgttcttaggtccgccgggcgcgggaaaaggtacccaatcgaaacgcattcaggaaaagactggcatcccgcatattagcacgggcgatatcttccgtgacatcgtcaagaaagagaacgatgaactggccaagaaaattaaagaaatcatggagaaaggtgaactcgttccagatgaactgggtaatgcggtagtaaaacgccgcctgtcggagaaagactgcgaaaaaggctttattttggatggttatccgcgtaccgtggctcaagcggaattcctggatagttttcttgaatcccagaacaaacagttgacagccgccgtgctgttcaaagtccccgaagatgttgttgtgcaacgtttaacctctcgcctgatctgtccgaaatgcgggcgtatctacaacatgatttttctgccaccaaaagaagacgagctgtgtgacgattgcaaagtcggcttagtacagcgtgatgatgataaggaagaaacggttcgtcaccgcctgaaagtctaccttgagaagacccagccggtcattgactattatggcaagaaaggtattctcaaacgcgtagatgggtcgcaaggaatcgacaacgttgttgcagaagtcctggggattctgggttggagcgataag

SEQ ID NO: 508 - protein, 231 aa, synthetic construct
  REGION 1..231: note = Variant of adenylate kinase
MHHHHHHGGSGMMAYLVFLGPPGAGKGTQSKRIQEKTGIPHISTGDIFRDIVKKENDELAKKIKEIMEKGELVPDELGNAVVKRRLSEKDCEKGFILDGYPRTVAQAEFLDSFLESQNKQLTAAVLFKVPEDVVVQRLTSRLICPKCGRIYNMIFLPPKEDELCDDCKVGLVQRDDDKEETVRHRLKVYLEKTQPVIDYYGKKGILKRVDGSQGIDNVVAEVLGILGWSDK

SEQ ID NO: 509 - DNA, 693 bp, synthetic construct
  misc_feature 1..693: note = Variant of adenylate kinase
  source 1..693: mol_type = other DNA
atgcaccatcatcaccatcacgggggctccggcatgatggcatatctggtgttcttaggtccgccgggcgcgggaaaaggtacccaatcgaaacgcattcaggaaaagactggcatcccacatattagcacgggcgatatcttccgtgacatcgtcaagaaagagaacgatgaactggccaaggcgattaaagaaatcatggagaaaggtgaactcgttccagatgaactgggtaatgcggtagtaaaacgccgcctgtcggagaaagactgcgaaaaaggctttattttggatggttatccgcgtaccgttgctcaagcggaattcctggatagttttcttgaatcccagaacaaacagttgacagccgcggtgctgttcaaagtccccgaagatgttgttgtgcaacgtttaacctctcgcctgatctgtccgaaatgcgggcgtatctacaacatgatttttctgccaccaaaagaagacgagctgtgtgacgattgcaaagtcaaattagtacagcgtgatgatgataaggaagaaacggttcgtcaccgcctgaaagtctaccttgagaagacccagccggtcattgactattatggcaagaaaggtattctcaaacgcgtagatgggtcgcaaggaatcgacaacgttgttgcagaagtcctggggattctgggttggagcgataag

SEQ ID NO: 510 - protein, 231 aa, synthetic construct
  REGION 1..231: note = Variant of adenylate kinase
MHHHHHHGGSGMMAYLVFLGPPGAGKGTQSKRIQEKTGIPHISTGDIFRDIVKKENDELAKAIKEIMEKGELVPDELGNAVVKRRLSEKDCEKGFILDGYPRTVAQAEFLDSFLESQNKQLTAAVLFKVPEDVVVQRLTSRLICPKCGRIYNMIFLPPKEDELCDDCKVKLVQRDDDKEETVRHRLKVYLEKTQPVIDYYGKKGILKRVDGSQGIDNVVAEVLGILGWSDK

SEQ ID NO: 511 - DNA, 693 bp, synthetic construct
  misc_feature 1..693: note = Variant of adenylate kinase
  source 1..693: mol_type = other DNA
atgcaccatcatcaccatcacgggggctccggcatgatggcatttctggtgttcttaggtccgccgggcgcgggaaaaggtacccaatcgaaacgcattcaggaaaagactggcatcccgcatattagcacgggcgatatcttccgtgacatcgtcaagaaagagaacgatgagctggccaagaaaattaaagaaatcatggagaaaggtgaactcgttccagatgaactgggtaatgcggtagtaaaacgccgcctgtcggagaaagactgcgaaaaaggctttattttggatggttatccgcgtaccgtggctcaagcggaattcctggatagttttcttgaatcccagaacaaacagttgacagccgccgtgctgttcaaagtccccgaagatgttgttgtgcaacgtttaacctctcgcctgatatgtccgaaatgcgggcgtatctacaacatgatttttctgccaccaaaagaagacgagctgtgtgacgattgcaaagtcggcttagtacagcgtgatgatgataaggaagaaacggttcgtcaccgcctgaaagtctaccttgagaagacccagccggtcattgactattatggcaagaaaggtattctcaaacgcgtagatgggtcgcaaggaatcgacaacgttgttgcagaagtcctggggattctgggttggagcgataag

SEQ ID NO: 512 - protein, 231 aa, synthetic construct
  REGION 1..231: note = Variant of adenylate kinase
MHHHHHHGGSGMMAFLVFLGPPGAGKGTQSKRIQEKTGIPHISTGDIFRDIVKKENDELAKKIKEIMEKGELVPDELGNAVVKRRLSEKDCEKGFILDGYPRTVAQAEFLDSFLESQNKQLTAAVLFKVPEDVVVQRLTSRLICPKCGRIYNMIFLPPKEDELCDDCKVGLVQRDDDKEETVRHRLKVYLEKTQPVIDYYGKKGILKRVDGSQGIDNVVAEVLGILGWSDK

SEQ ID NO: 513 - DNA, 693 bp, synthetic construct
  misc_feature 1..693: note = Variant of adenylate kinase
  source 1..693: mol_type = other DNA
atgcaccatcatcaccatcacgggggctccggcatgatggcatttctggtgttcttaggtccgccgggcgcgggaaaaggtacccaatcgaaacgcattcaggaaaagactggcatcccgcatattagcacgggcgatatcttccgtgacatcgtcaagaaagagaacgatgaactggccaagaaaattaaagaaatcatggcaaaaggtgaactcgttccagatgaactgggtaatgcggtagtaaaacgccgcctgtcggagaaagactgcgaaaaaggctttattttggatggttatccgcgtaccgtggctcaagcggaattcctggatagttttcttgaatcccagaacaaacagttgacagccgccgtgctgttcaaagtccccgaagatgttgttgtgcaacgtttaacctctcgcctgatctgtccgaaatgcgggcgtatctacaacatgatttttctgccaccaaaagaagacgagctgtgtgacgattgcaaagtcggcttagtacagcgtgatgatgataaggaagaaacggttcgtcaccgcctgaaagtctaccttgagaagacccagccggtcattgactattatggcaagaaaggtattctcaaacgcgtagatgggtcgcaaggaatcgacaacgttgttgcagaagtcctggggattctgggttggagcgataag

SEQ ID NO: 514 - protein, 231 aa, synthetic construct
  REGION 1..231: note = Variant of adenylate kinase
MHHHHHHGGSGMMAFLVFLGPPGAGKGTQSKRIQEKTGIPHISTGDIFRDIVKKENDELAKKIKEIMAKGELVPDELGNAVVKRRLSEKDCEKGFILDGYPRTVAQAEFLDSFLESQNKQLTAAVLFKVPEDVVVQRLTSRLICPKCGRIYNMIFLPPKEDELCDDCKVGLVQRDDDKEETVRHRLKVYLEKTQPVIDYYGKKGILKRVDGSQGIDNVVAEVLGILGWSDK

SEQ ID NO: 515 - DNA, 693 bp, synthetic construct
  misc_feature 1..693: note = Variant of adenylate kinase
  source 1..693: mol_type = other DNA
atgcaccatcatcaccatcacgggggctccggcatgatggcatttctggtgttcttaggtccgccgggcgcgggaaaaggtacccaatcgaaacgcattcaggaaaagactggcatcccgcatattagcacgggcgatatcttccgtgacatcgtcaagaaagagaacgatgaactggccaagaaaattaaagaaatcatggagaaaggtgaactcgttccagatgaactgggtaatgcggtagtaaaacgccgcctgtcggagaaagactgcgaaaaaggctttattttggatggttatccgcgtaccgtggctcaagcggaattcctggatagttttcttgaatcccagaacaaacagttgacagccgccgtgctgttcaaagtccccgaagatgttgttgtgcaacgtttaacctctcgcctgatctgtccgaaatgcgggcgtatctacaacatgatttttctgccaccaaaagaagacgagctgtgtgacgattgcaaagtcggcttagtacagcgtgatgatgataaggaagaagtcgttcgtcaccgcctgaaagtctaccttgagaagacccagccggtcattgactattatggcaagaaaggtattctcaaacgcgtagatgggtcgcaaggaatcgacaacgttgttgcagaagtcctggggattctgggttggagcgataag

SEQ ID NO: 516 - protein, 231 aa, synthetic construct
  REGION 1..231: note = Variant of adenylate kinase
MHHHHHHGGSGMMAFLVFLGPPGAGKGTQSKRIQEKTGIPHISTGDIFRDIVKKENDELAKKIKEIMEKGELVPDELGNAVVKRRLSEKDCEKGFILDGYPRTVAQAEFLDSFLESQNKQLTAAVLFKVPEDVVVQRLTSRLICPKCGRIYNMIFLPPKEDELCDDCKVGLVQRDDDKEEVVRHRLKVYLEKTQPVIDYYGKKGILKRVDGSQGIDNVVAEVLGILGWSDK

SEQ ID NO: 517 - DNA, 693 bp, synthetic construct
  misc_feature 1..693: note = Variant of adenylate kinase
  source 1..693: mol_type = other DNA
atgcaccatcatcaccatcacgggggctccggcatgagtgcatttctggtgttcttaggtccgccgggcgcgggaaaaggtacccaatcgaaacgcattcaggaaaagactggcatcccgcatattagcacgggcgatatcttccgtgacatcgtcaagaaagagaacgatgaactggccaagaaaattaaagaaatcatggagaaaggtgaactcgttccagatgaactgggtaatgcggtagtaaaacgccgcctgtcggagaaagactgcgaaaaaggctttattttggatggttatccgcgtaccgtggctcaagcggaattcctggatagttttcttgaatcccagaacaaacagttgacagccgccgtgctgttcaaagtccccgaagatgttgttgtgcaacgtttaacctctcgcctgatctgtccgaaatgcgggcgtatctacaacatgatttttctgccaccaaaagaagacgagctgtgtgacgattgcaaagtcggcttagtacagcgtgatgatgataaggaagaaacggttcgtcaccgcctgaaagtctaccttgagaagacccagccggtcattgactattatggcaagaaaggtattctcaaacgcgtagatgggtcgcaaggaatcgacaacgttgttgcagaagtcctggggattctgggttggagcgataag

SEQ ID NO: 518 - protein, 231 aa, synthetic construct
  REGION 1..231: note = Variant of adenylate kinase
MHHHHHHGGSGMSAFLVFLGPPGAGKGTQSKRIQEKTGIPHISTGDIFRDIVKKENDELAKKIKEIMEKGELVPDELGNAVVKRRLSEKDCEKGFILDGYPRTVAQAEFLDSFLESQNKQLTAAVLFKVPEDVVVQRLTSRLICPKCGRIYNMIFLPPKEDELCDDCKVGLVQRDDDKEETVRHRLKVYLEKTQPVIDYYGKKGILKRVDGSQGIDNVVAEVLGILGWSDK

SEQ ID NO: 519 - DNA, 693 bp, synthetic construct
  misc_feature 1..693: note = Variant of adenylate kinase
  source 1..693: mol_type = other DNA
atgcaccatcatcaccatcacgggggctccggcatgagtgcatttctggtgttcttaggtccgccgggcgcgggaaaaggtacccaatcgaaacgcattcaggaaaagactggcatcccgcatattagcacgggcgatatcttccgtgacatcgtcaagaaagagaacgatgaactggccaagaaaattaaagaaatcatggagaaaggtgaactcgttccagatgaactgggtaatgcggtagtaaaacgccgcctgtcggagaaagactgcgaaaaaggctttattttggatggttatccgcgtaccgtggctcaagcggaattcctggatagttttcttgaatcccagaacaaacagttgacagccgccgtgctgttcaaagtccccgaagatgttgttgtgcaacgtttaacctctcgcctgatctgtccgaaatgcgggcgtatctacaacatgatttttctgccaccaaaagaagacgagctgtgtgacgattgcaaagtcggcttagtacagcgtgatgatgataaggaagaaacggttcgtcaccgcctgaaagtctaccttgagaagacccagccggtcattgactattatagtaagaaaggtattctcaaacgcgtagatgggtcgcaaggaatcgacaacgttgttgcagaagtcctggggattctgggttggagcgataag

SEQ ID NO: 520 - protein, 231 aa, synthetic construct
  REGION 1..231: note = Variant of adenylate kinase
MHHHHHHGGSGMSAFLVFLGPPGAGKGTQSKRIQEKTGIPHISTGDIFRDIVKKENDELAKKIKEIMEKGELVPDELGNAVVKRRLSEKDCEKGFILDGYPRTVAQAEFLDSFLESQNKQLTAAVLFKVPEDVVVQRLTSRLICPKCGRIYNMIFLPPKEDELCDDCKVGLVQRDDDKEETVRHRLKVYLEKTQPVIDYYSKKGILKRVDGSQGIDNVVAEVLGILGWSDK

SEQ ID NO: 521 - DNA, 693 bp, synthetic construct
  misc_feature 1..693: note = Variant of adenylate kinase
  source 1..693: mol_type = other DNA
atgcaccatcatcaccatcacgggggctccggcatgatggcatatctggtgttcttaggtccgccgggcgcgggaaaaggtacccaatcgaaacgcattcaggaaaagactggcatcccgcatattagcacgggcgatatcttccgtgacatcgtcaagcagcaaaacgatgaactggccaagaaaattaaagaaatcatggagaaaggtgaactcgttccagatgaactgggtaatgcggtagtaaaacgccgcctgtcggagaaagactgcgaaaaaggctttattttggatggttatccgcgtaccgtggctcaagcggaattcctggatagttttcttgaatcccagaacaaacagttgacagccgccgtgctgttcaaagtccccgaagatgtagttgtgcaacgtttaacctctcgcctgatctgtccgaaatgcgggcgtatctacaacatgatttttctgccaccaaaagaagacgagctgtgtgacgattgcaaagtcggcttagtacagcgtgatgatgataaggaagaaacggttcgtcaccgcctgaaagtctaccttgagaagacccagccggtcattgactattatggcaagaaaggtattctcaaacgcgtagatgggtcgcaaggaatcgacaacgttgttgcagaagtcctggggattctgggttggagcgataag

SEQ ID NO: 522 - protein, 231 aa, synthetic construct
  REGION 1..231: note = Variant of adenylate kinase
MHHHHHHGGSGMMAYLVFLGPPGAGKGTQSKRIQEKTGIPHISTGDIFRDIVKQQNDELAKKIKEIMEKGELVPDELGNAVVKRRLSEKDCEKGFILDGYPRTVAQAEFLDSFLESQNKQLTAAVLFKVPEDVVVQRLTSRLICPKCGRIYNMIFLPPKEDELCDDCKVGLVQRDDDKEETVRHRLKVYLEKTQPVIDYYGKKGILKRVDGSQGIDNVVAEVLGILGWSDK

SEQ ID NO: 523 - DNA, 693 bp, synthetic construct
  misc_feature 1..693: note = Variant of adenylate kinase
  source 1..693: mol_type = other DNA
atgcaccatcatcaccatcacgggggctccggcatgatggcatatctggtgttcttaggtccgccgggcgcgggaaaaggtacccaatcgaaacgcattcaggaaaagactggcatcccgcatattagcacgggcgatatcttccgtgacatcgtcaagaagcaaaacgatgaactggccaagaaaattaaagaaatcatggagaaaggtgaactcgttccagatgaactgggtaatgcggtagtaaaacgccgcctgtcggagaaagactgcgaaaaaggctttattttggatggttatccgcgtaccgtggctcaagcggaattcctggatagttttcttgaatcccagaacaaacagttgacagccgccgtgctgttcaaagtccccgaagatgaagttgtgcaacgtttaacctctcgcctgatctgtccgaaatgcgggcgtatctacaacatgatttttctgccaccaaaagaagacgagctgtgtgacgattgcaaagtcggcttagtacagcgtgatgatgataaggaagaaacggttcgtcaccgcctgaaagtctaccttgagaagacccagccggtcattgactattatggcaagaaaggtattctcaaacgcgtagatgggtcgcaaggaatcgacaacgttgttgcagaagtcctggggattctgggttggagcgataag

SEQ ID NO: 524 - protein, 231 aa, synthetic construct
  REGION 1..231: note = Variant of adenylate kinase
MHHHHHHGGSGMMAYLVFLGPPGAGKGTQSKRIQEKTGIPHISTGDIFRDIVKKQNDELAKKIKEIMEKGELVPDELGNAVVKRRLSEKDCEKGFILDGYPRTVAQAEFLDSFLESQNKQLTAAVLFKVPEDEVVQRLTSRLICPKCGRIYNMIFLPPKEDELCDDCKVGLVQRDDDKEETVRHRLKVYLEKTQPVIDYYGKKGILKRVDGSQGIDNVVAEVLGILGWSDK

SEQ ID NO: 525 - DNA, 693 bp, synthetic construct
  misc_feature 1..693: note = Variant of adenylate kinase
  source 1..693: mol_type = other DNA
atgcaccatcatcaccatcacgggggctccggcatgatggcatatctggtgttcttaggtccgccgggcgcgggaaaaggtacccaatcgaaacgcattcaggaaaagactggcatcccgcatattagcacgggcgatatcttccgtgacatcgtcaagaagcaaaacgatgaactggccaagaaaattaaagaaatcatggagaaaggtgaactcgttccagatgaactgggtaatgcggtagtaaaacgccgcctgtcggagaaagactgcgaaaaaggctttattttggatggttatccgcgtaccgtggctcaagcggaattcctggatagttttcttgaatcccagaacaaacagttgacagccgccgtgctgttcaaagtccccgaagatgaagttgtgcaacgtttaacctctcgcctgatctgtccgaaatgcgggcgtatctacaacatgatttttctgccaccaaaagaagacgagctgtgtgacgattgcaaagtcggcttagtacagcgtgatgatgataaggaagaaacggttcgtcaccgcctgaaagtctaccttgagaagacccagccggtcgcggactattatggcaagaaaggtattctcaaacgcgtagatgggtcgcaaggaatcgacaacgttgttgcagaagtcctggggattctgggttggagcgataag

SEQ ID NO: 526 - protein, 231 aa, synthetic construct
  REGION 1..231: note = Variant of adenylate kinase
MHHHHHHGGSGMMAYLVFLGPPGAGKGTQSKRIQEKTGIPHISTGDIFRDIVKKQNDELAKKIKEIMEKGELVPDELGNAVVKRRLSEKDCEKGFILDGYPRTVAQAEFLDSFLESQNKQLTAAVLFKVPEDEVVQRLTSRLICPKCGRIYNMIFLPPKEDELCDDCKVGLVQRDDDKEETVRHRLKVYLEKTQPVADYYGKKGILKRVDGSQGIDNVVAEVLGILGWSDK

SEQ ID NO: 527 - DNA, 693 bp, synthetic construct
  misc_feature 1..693: note = Variant of adenylate kinase
  source 1..693: mol_type = other DNA
atgcaccatcatcaccatcacgggggctccggcatgatggcatatctggtgttcttaggtccgccgggcgcgggaaaaggtacccaatcgaaacgcattcaggaaaagactggcatcccgcatattagcacgggcgatatcttccgtgacatcgtcaagcagcaaaacgatgaactggccaagaaaattaaagaaatcatggagaaaggtgaactcgttccagatgaactgggtaatgcggtagtaaaacgccgcctgtcggagaaagactgcgaaaaaggctttattttggatggttatccgcgtaccgtggctcaagcggaattcctggatagttttcttgaatcccagaacaaacagttgacagccgccgtgctgttcaaagtccccgaagatgaagttgtgcaacgtttaacctctcgcctgatctgtccgaaatgcgggcgtatctacaacatgatttttctgccaccaaaagaagacgagctgtgtgacgattgcaaagtcggcttagtacagcgtgatgatgataaggaagaaacggttcgtcaccgcctgaaagtctaccttgagaagacccagccggtcgcggactattatggcaagaaaggtattctcaaacgcgtagatgggtcgcaaggaatcgacaacgttgttgcagaagtcctggggattctgggttggagcgataag

SEQ ID NO: 528 - protein, 231 aa, synthetic construct
  REGION 1..231: note = Variant of adenylate kinase
MHHHHHHGGSGMMAYLVFLGPPGAGKGTQSKRIQEKTGIPHISTGDIFRDIVKQQNDELAKKIKEIMEKGELVPDELGNAVVKRRLSEKDCEKGFILDGYPRTVAQAEFLDSFLESQNKQLTAAVLFKVPEDEVVQRLTSRLICPKCGRIYNMIFLPPKEDELCDDCKVGLVQRDDDKEETVRHRLKVYLEKTQPVADYYGKKGILKRVDGSQGIDNVVAEVLGILGWSDK

SEQ ID NO: 529 - DNA, 693 bp, synthetic construct
  misc_feature 1..693: note = Variant of adenylate kinase
  source 1..693: mol_type = other DNA
atgcaccatcatcaccatcacgggggctccggcatgatggcatatctggtgttcttaggtccgccgggcgcgggaaaaggtacccaatcgaaacgcattcaggaaaagactggcatcccgcatattagcacgggcgatatcttccgtgacatcgtcaagaaagagaacgatgaactggccaagaaaattaaagaaatcatggcaaaaggtgaactcgttccagatgaactgggtaatgcggtagtaaaacgccgcctgtcggagaaagactgcgaaaaaggctttattttggatggttatccgcgtaccgtggctcaagcggaattcctggatagttttcttgaatcccagaacaaacagttgacagccgccgtgctgttcaaagtccccgaagatgttgttgtgcaacgtttaacctctcgcctgatctgtccgaaatgcgggcgtatctacaacatgatttttctgccaccaaaagaagacgagctgtgtgacgattgcaaagtcggcttagtacagcgtgatgatgataaggaagaaacggttcgtcaccgcctgaaagtctaccttgagaagacccagccggtcattgactattatggcaagaaaggtattctcaaacgcgtagatgggtcgcaaggaatcgacaacgttgttgcagaagtcctggggattctgggttggagcgataag

SEQ ID NO: 530 - protein, 231 aa, synthetic construct
  REGION 1..231: note = Variant of adenylate kinase
MHHHHHHGGSGMMAYLVFLGPPGAGKGTQSKRIQEKTGIPHISTGDIFRDIVKKENDELAKKIKEIMAKGELVPDELGNAVVKRRLSEKDCEKGFILDGYPRTVAQAEFLDSFLESQNKQLTAAVLFKVPEDVVVQRLTSRLICPKCGRIYNMIFLPPKEDELCDDCKVGLVQRDDDKEETVRHRLKVYLEKTQPVIDYYGKKGILKRVDGSQGIDNVVAEVLGILGWSDK

SEQ ID NO: 531 - DNA, 693 bp, synthetic construct
  misc_feature 1..693: note = Variant of adenylate kinase
  source 1..693: mol_type = other DNA
atgcaccatcatcaccatcacgggggctccggcatgatggcatatctggtgttcttaggtccgccgggcgcgggaaaaggtacccaatcgaaacgcattcaggaaaagactggcatcccgcatattagcacgggcgatatcttccgtgacatcgtcaagcaggaaaacgatgaactggccaagaaaattaaagaaatcatggagaaaggtgaactcgttccagatgaactgggtaatgcggtagtaaaacgccgcctgtcggagaaagactgcgaaaaaggctttattttggatggttatccgcgtaccgtggctcaagcggaattcctggatagttttcttgaatcccagaacaaacagttgacagccgccgtgctgttcaaagtccccgaagatgaagttgtgcaacgtttaacctctcgcctgatctgtccgaaatgcgggcgtatctacaacatgatttttctgccaccaaaagaagacgagctgtgtgacgattgcaaagtcggcttagtacagcgtgatgatgataaggaagaaacggttcgtcaccgcctgaaagtctaccttgagaagacccagccggtcgcggactattatggcaagaaaggtattctcaaacgcgtagatgggtcgcaaggaatcgacaacgttgttgcagaagtcctggggattctgggttggagcgataag

SEQ ID NO: 532 - protein, 231 aa, synthetic construct
  REGION 1..231: note = Variant of adenylate kinase
MHHHHHHGGSGMMAYLVFLGPPGAGKGTQSKRIQEKTGIPHISTGDIFRDIVKQENDELAKKIKEIMEKGELVPDELGNAVVKRRLSEKDCEKGFILDGYPRTVAQAEFLDSFLESQNKQLTAAVLFKVPEDEVVQRLTSRLICPKCGRIYNMIFLPPKEDELCDDCKVGLVQRDDDKEETVRHRLKVYLEKTQPVADYYGKKGILKRVDGSQGIDNVVAEVLGILGWSDK

SEQ ID NO: 533 - DNA, 693 bp, synthetic construct
  misc_feature 1..693: note = Variant of adenylate kinase
  source 1..693: mol_type = other DNA
atgcaccatcatcaccatcacgggggctccggcatgatggcatatctggtgttcttaggtccgccgggcgcgggaaaaggtacccaatcgaaacgcattcaggaaaagactggcatcccgcatattagcacgggcgatatcttccgtgacatcgtcaagcaggaaaacgatgaactggccaagaaaattaaagaaatcatggagaaaggtgaactcgttccagatgaactgggtaatgcggtagtaaaacgccgcctgtcggagaaagactgcgaaaaaggctttattttggatggttatccgcgtaccgtggctcaagcggaattcctggatagttttcttgaatcccagaacaaacagttgacagccgccgtgctgttcaaagtccccgaagatgttgttgtgcaacgtttaacctctcgcctgatctgtccgaaatgcgggcgtatctacaacatgatttttctgccaccaaaagaagacgagctgtgtgacgattgcaaagtcggcttagtacagcgtgatgatgataaggaagaaacggttcgtcaccgcctgaaagtctaccttgagaagacccagccggtcgcggactattatggcaagaaaggtattctcaaacgcgtagatgggtcgcaaggaatcgacaacgttgttgcagaagtcctggggattctgggttggagcgataag

SEQ ID NO: 534 - protein, 231 aa, synthetic construct
  REGION 1..231: note = Variant of adenylate kinase
MHHHHHHGGSGMMAYLVFLGPPGAGKGTQSKRIQEKTGIPHISTGDIFRDIVKQENDELAKKIKEIMEKGELVPDELGNAVVKRRLSEKDCEKGFILDGYPRTVAQAEFLDSFLESQNKQLTAAVLFKVPEDVVVQRLTSRLICPKCGRIYNMIFLPPKEDELCDDCKVGLVQRDDDKEETVRHRLKVYLEKTQPVADYYGKKGILKRVDGSQGIDNVVAEVLGILGWSDK

SEQ ID NO: 535 - DNA, 693 bp, synthetic construct
  misc_feature 1..693: note = Variant of adenylate kinase
  source 1..693: mol_type = other DNA
atgcaccatcatcaccatcacgggggctccggcatgagtgcatttctggtgttcttaggtccgccgggcgcgggaaaaggtacccaatcgaaacgcattcaggaaaagactggcatcccgcatattagcacgggcgatatcttccgtgacatcgtcaagaaagagaacgatgaactggccaagaaaattaaagaaatcatgtataaaggtgaactcgttccagatgaactgggtaatgcggtagtaaaacgccgcctgtcggagaaagactgcgaaaaaggctttattttggatggttatccgcgtaccgtggctcaagcggaattcctggatagttttcttgaatcccagaacaaacagttgacagccgccgtgctgttcaaagtccccgaagatgttgttgtgcaacgtttaacctctcgcctgatctgtccgaaatgcgggcgtatctacaacatgatttttctgccaccaaaagaagacgagctgtgtgacgattgcaaagtcggcttagtacagcgtgatgatgataaggaagaaacggttcgtcaccgcctgaaagtctaccttgagaagacccagccggtcattgactattatggcaagaaaggtattctcaaacgcgtagatgggtcgcaaggaatcgacaacgttgttgcagaagtcctggggattctgggttggagcgataag

SEQ ID NO: 536 - protein, 231 aa, synthetic construct
  REGION 1..231: note = Variant of adenylate kinase
MHHHHHHGGSGMSAFLVFLGPPGAGKGTQSKRIQEKTGIPHISTGDIFRDIVKKENDELAKKIKEIMYKGELVPDELGNAVVKRRLSEKDCEKGFILDGYPRTVAQAEFLDSFLESQNKQLTAAVLFKVPEDVVVQRLTSRLICPKCGRIYNMIFLPPKEDELCDDCKVGLVQRDDDKEETVRHRLKVYLEKTQPVIDYYGKKGILKRVDGSQGIDNVVAEVLGILGWSDK

SEQ ID NO: 537 - DNA, 693 bp, synthetic construct
  misc_feature 1..693: note = Variant of adenylate kinase
  source 1..693: mol_type = other DNA
atgcaccatcatcaccatcacgggggctccggcatgatggcatatctggtgttcttaggtccgccgggcgcgggaaaaggtacccaatcgaaacgcattgtggaaaagactggcatcccgcatattagcacgggcgatatcttccgtgacatcgtcaagaaagagaacgatgaactggccaagaaaattaaagaaatcatggagaaaggtgaactcgttccagatgaactgggtaatgcggtagtaaaacgccgcctgtcggagaaagactgcgaaaaaggctttattttggatggttatccgcgtaccgtggctcaagcggaattcctggatagttttcttgaatcccagaacaaacagttgacagccgccgtgctgttcaaagtccccgaagatgttgttgtgcaacgtttaacctctcgcctgatctgtccgaaatgcgggcgtatctacaacatgatttttctgccaccaaaagaagacgagctgtgtgacgattgcaaagtcggcttagtacagcgtgatgatgataaggaagaaacggttcgtcaccgcctgaaagtctaccttgagaagacccagccggtcattgactattatggcaagaaaggtattctcaaacgcgtagatgggtcgcaaggaatcgacaacgttgttgcagaagtcctggggattctgggttggagcgataag

SEQ ID NO: 538 - protein, 231 aa, synthetic construct
  REGION 1..231: note = Variant of adenylate kinase
MHHHHHHGGSGMMAYLVFLGPPGAGKGTQSKRIVEKTGIPHISTGDIFRDIVKKENDELAKKIKEIMEKGELVPDELGNAVVKRRLSEKDCEKGFILDGYPRTVAQAEFLDSFLESQNKQLTAAVLFKVPEDVVVQRLTSRLICPKCGRIYNMIFLPPKEDELCDDCKVGLVQRDDDKEETVRHRLKVYLEKTQPVIDYYGKKGILKRVDGSQGIDNVVAEVLGILGWSDK

SEQ ID NO: 539 - DNA, 693 bp, synthetic construct
  misc_feature 1..693: note = Variant of adenylate kinase
  source 1..693: mol_type = other DNA
atgcaccatcatcaccatcacgggggctccggcatgatggcatatctggtgttcttaggtccgccgggcgcgggaaaaggtacccaatcgaaacgcattcaggaaaagactggcatcccgcatattagcacgggcgatatcttccgtgacatcgtcaagcaggaaaacgatgaactggccaagaaaattaaagaaatcatggagaaaggtgaactcgttccagatgaactgggtaatgcggtagtaaaacgccgcctgtcggagaaagactgcgaaaaaggctttattttggatggttatccgcgtaccgtggctcaagcggaattcctggatagttttcttgaatcccagaacaaacagttgacagccgccgtgctgttcaaagtccccgaagatgttgttgtgcaacgtttaacctctcgcctgatctgtccgaaatgcgggcgtatctacaacatgatttttctgccaccaaaagaagacgagctgtgtgacgattgcaaagtcggcttagtacagcgtgatgatgataaggaagaaacggttcgtcaccgcctgaaagtctaccttgagaagacccagccggtcattgactattatggcaagaaaggtattctcaaacgcgtagatgggtcgcaaggaatcgacaacgttgttgcagaagtcctggggattctgggttggagcgataag

SEQ ID NO: 540 - protein, 231 aa, synthetic construct
  REGION 1..231: note = Variant of adenylate kinase
MHHHHHHGGSGMMAYLVFLGPPGAGKGTQSKRIQEKTGIPHISTGDIFRDIVKQENDELAKKIKEIMEKGELVPDELGNAVVKRRLSEKDCEKGFILDGYPRTVAQAEFLDSFLESQNKQLTAAVLFKVPEDVVVQRLTSRLICPKCGRIYNMIFLPPKEDELCDDCKVGLVQRDDDKEETVRHRLKVYLEKTQPVIDYYGKKGILKRVDGSQGIDNVVAEVLGILGWSDK

SEQ ID NO: 541 - DNA, 693 bp, synthetic construct
  misc_feature 1..693: note = Variant of adenylate kinase
  source 1..693: mol_type = other DNA
atgcaccatcatcaccatcacgggggctccggcatgatggcatatctggtgttcttaggtccgccgggcgcgggaaaaggtacccaatcgaaacgcattcaggaaaagactggcatcccgcatattagcacgggcgatatcttccgtgacatcgtcaagaaagagaacgatgaactggccaagaaaattaaagaaatcatggagaaaggtgaactcgttccagatgaactgggtaatgcggtagtaaaacgccgcctgtcggagaaagactgcgaaaaaggctttattttggatggttatccgcgtaccgtggctcaagcggaattcctggatagttttcttgaatcccagaacaaacagttgacagccgccgtgctgttcaaagtccccgaagatgaagttgtgcaacgtttaacctctcgcctgatctgtccgaaatgcgggcgtatctacaacatgatttttctgccaccaaaagaagacgagctgtgtgacgattgcaaagtcggcttagtacagcgtgatgatgataaggaagaaacggttcgtcaccgcctgaaagtctaccttgagaagacccagccggtcattgactattatggcaagaaaggtattctcaaacgcgtagatgggtcgcaaggaatcgacaacgttgttgcagaagtcctggggattctgggttggagcgataag

SEQ ID NO: 542 - protein, 231 aa, synthetic construct
  REGION 1..231: note = Variant of adenylate kinase
MHHHHHHGGSGMMAYLVFLGPPGAGKGTQSKRIQEKTGIPHISTGDIFRDIVKKENDELAKKIKEIMEKGELVPDELGNAVVKRRLSEKDCEKGFILDGYPRTVAQAEFLDSFLESQNKQLTAAVLFKVPEDEVVQRLTSRLICPKCGRIYNMIFLPPKEDELCDDCKVGLVQRDDDKEETVRHRLKVYLEKTQPVIDYYGKKGILKRVDGSQGIDNVVAEVLGILGWSDK

SEQ ID NO: 543 - DNA, 693 bp, synthetic construct
  misc_feature 1..693: note = Variant of adenylate kinase
  source 1..693: mol_type = other DNA
atgcaccatcatcaccatcacgggggctccggcatgatggcatatctggtgttcttaggtccgccgggcgcgggaaaaggtacccaatcgaaacgcattcaggaaaagactggcatcccgcatattagcacgggcgatatcttccgtgacatcgtcaagaaagagaacgatgaactggccaaaaaaattaaagaaatcatggagaaaggtgaactcgttccagatgaactgggtaatgcggtagtaaaacgccgcctgtcggagaaagactgcgaaaaaggctttattttggatggttatccgcgtaccgtggctcaagcggaattcctggatagttttcttgaatcccagaacaaaaagttgacagccgccgtgctgtttaaagtccccgaagatgttgttgtgcaacgtttaacctctcgcctgatctgtccgaaatgcgggcgtatctacaacatgatttttctgccaccaaaagaagacgagctgtgtgacgattgcaaagtcggtttagtacagcgtgatgatgataaggaagaaacggttcgtcaccgcctgaaagtctaccttgagaagacccagccggtcattgactattatggcaagaaaggtattctcaaacgcgtagatgggtcgcaaggaatcgacaacgttgttgcagaagtcctggggattctgggttggagcgataag

SEQ ID NO: 544 - protein, 231 aa, synthetic construct
  REGION 1..231: note = Variant of adenylate kinase
MHHHHHHGGSGMMAYLVFLGPPGAGKGTQSKRIQEKTGIPHISTGDIFRDIVKKENDELAKKIKEIMEKGELVPDELGNAVVKRRLSEKDCEKGFILDGYPRTVAQAEFLDSFLESQNKKLTAAVLFKVPEDVVVQRLTSRLICPKCGRIYNMIFLPPKEDELCDDCKVGLVQRDDDKEETVRHRLKVYLEKTQPVIDYYGKKGILKRVDGSQGIDNVVAEVLGILGWSDK

SEQ ID NO: 545 - DNA, 693 bp, synthetic construct
  misc_feature 1..693: note = Variant of adenylate kinase
  source 1..693: mol_type = other DNA
atgcaccatcatcaccatcacgggggctccggcatgatggcatatctggtgttcttaggtccgccgggcgcgggaaaaggtacccaatcgaaacgcattgtggaaaagactggcatcccgcatattagcacgggcgatatcttccgtgacatcgtcaagaaagagaacgatgaactggccaaaaaaattaaagaaatcatggagaaaggtgaactcgttccagatgaactgggtaatgcggtagtaaaacgccgcctgtcggagaaagactgcgaaaaaggctttattttggatggttatccgcgtaccgtggctcaagcggaattcctggatagttttcttgaatcccagaacaaacagttgacagccgccgtgctgttcaaagtccccgaagatgctgttgtgcaacgtttaacctctcgcctgatctgtccgaaatgcgggcgtatctacaacatgatttttctgccaccaaaagaagacgagctgtgtgacgattgcaaagtcggcttagtacagcgtgatgatgataaggaagaaacggttcgtcaccgcctgaaagtctaccttgagaagacccagccggtcattgactattatggcaagaaaggtattctcaaacgcgtagatgggtcgcaaggaatcgacaacgttgttgcagaagtcctggggattctgggttggagcgataag

SEQ ID NO: 546 - protein, 231 aa, synthetic construct
  REGION 1..231: note = Variant of adenylate kinase
MHHHHHHGGSGMMAYLVFLGPPGAGKGTQSKRIVEKTGIPHISTGDIFRDIVKKENDELAKKIKEIMEKGELVPDELGNAVVKRRLSEKDCEKGFILDGYPRTVAQAEFLDSFLESQNKQLTAAVLFKVPEDAVVQRLTSRLICPKCGRIYNMIFLPPKEDELCDDCKVGLVQRDDDKEETVRHRLKVYLEKTQPVIDYYGKKGILKRVDGSQGIDNVVAEVLGILGWSDK

SEQ ID NO: 547 - DNA, 693 bp, synthetic construct
  misc_feature 1..693: note = Variant of adenylate kinase
  source 1..693: mol_type = other DNA
atgcaccatcatcaccatcacgggggctccggcatgagtgcatttctggtgttcttaggtccgccgggcgcgggaaaaggtacccaatcgaaacgcattcaggaaaagactggcatcccgcatattagcacgggcgatatcttccgtgacatcgtcaagaaagagaacgatgagctggccaagaaaattaaagaaatcatggagaaaggtgaactcgttccagatgaactgggtaatgcggtagtaaaacgccgcctgtcggagaaagactgcgaaaaaggctttattttggatggttatccgcgtaccgtggctcaagcggaattcctggatagttttcttgaatcccagaacaaacagttgacagccgccgtgctgttcaaagtccccgaagatgttgttgtgcaacgtttaacctctcgcctgatctgtccgaaatgcgggcgtatctacaacatgatttttctgccaccaaaagaagacgagctgtgtgacgattgcaaagtcggcttagtacagcgtgatgatgataaggaagaagtcgttcgtcaccgcctgaaagtctaccttgagaagacccagccggtcattgactattatggcaagaaaggtattctcaaacgcgtagatgggtcgcaaggaatcgacaacgttgttgcagaagtcctggggattctgggttggagcgataag

SEQ ID NO: 548 - protein, 231 aa, synthetic construct
  REGION 1..231: note = Variant of adenylate kinase
MHHHHHHGGSGMSAFLVFLGPPGAGKGTQSKRIQEKTGIPHISTGDIFRDIVKKENDELAKKIKEIMEKGELVPDELGNAVVKRRLSEKDCEKGFILDGYPRTVAQAEFLDSFLESQNKQLTAAVLFKVPEDVVVQRLTSRLICPKCGRIYNMIFLPPKEDELCDDCKVGLVQRDDDKEEVVRHRLKVYLEKTQPVIDYYGKKGILKRVDGSQGIDNVVAEVLGILGWSDK

SEQ ID NO: 549 - DNA, 693 bp, synthetic construct
  misc_feature 1..693: note = Variant of adenylate kinase
  source 1..693: mol_type = other DNA
atgcaccatcatcaccatcacgggggctccggcatgatggcatatctggtgttcttaggtccgccgggcgcgggaaaaggtacccaatcgaaacgcattcaggaaaagactggcatcccgcatattagcacgggcgatatcttccgtgacatcgtcaagaagcaaaacgatgaactggccaagaaaattaaagaaatcatggagaaaggtgaactcgttccagatgaactgggtaatgcggtagtaaaacgccgcctgtcggagaaagactgcgaaaaaggctttattttggatggttatccgcgtaccgtggctcaagcggaattcctggatagttttcttgaatcccagaacaaacagttgacagccgccgtgctgttcaaagtccccgaagatgttgttgtgcaacgtttaacctctcgcctgatctgtccgaaatgcgggcgtatctacaacatgatttttctgccaccaaaagaagacgagctgtgtgacgattgcaaagtcggcttagtacagcgtgatgatgataaggaagaaacggttcgtcaccgcctgaaagtctaccttgagaagacccagccggtcattgactattatggcaagaaaggtattctcaaacgcgtagatgggtcgcaaggaatcgacaacgttgttgcagaagtcctggggattctgggttggagcgataag

SEQ ID NO: 550 - protein, 231 aa, synthetic construct
  REGION 1..231: note = Variant of adenylate kinase
MHHHHHHGGSGMMAYLVFLGPPGAGKGTQSKRIQEKTGIPHISTGDIFRDIVKKQNDELAKKIKEIMEKGELVPDELGNAVVKRRLSEKDCEKGFILDGYPRTVAQAEFLDSFLESQNKQLTAAVLFKVPEDVVVQRLTSRLICPKCGRIYNMIFLPPKEDELCDDCKVGLVQRDDDKEETVRHRLKVYLEKTQPVIDYYGKKGILKRVDGSQGIDNVVAEVLGILGWSDK

SEQ ID NO: 551 - DNA, 693 bp, synthetic construct
  misc_feature 1..693: note = Variant of adenylate kinase
  source 1..693: mol_type = other DNA
atgcaccatcatcaccatcacgggggctccggcatgatggcatttctggtgttcttaggtccgccgggcgcgggaaaaggtacccaatcgaaacgcattcaggaaaagactggcatcccgcatattagcacgggcgatatcttccgtgacatcgtcaagaaagagaacgatgagatggccaagaaaattaaagaaatcatggagaaaggtgaactcgttccagatgaactgggtaatgcggtagtaaaacgccgcctgtcggagaaagactgcgaaaaaggctttattttggatggttatccgcgtaccgtggctcaagcggaattcctggatagttttcttgaatcccagaacaaacagttgacagccgccgtgctgttcaaagtccccgaagatgttgttgtgcaacgtttaacctctcgcctgatctgtccgaaatgcgggcgtatctacaacatgatttttctgccaccaaaagaagacgagctgtgtgacgattgcaaagtcggcttagtacagcgtgatgatgataaggaagaaacggttcgtcaccgcctgaaagtctaccttgagaagacccagccggtcattgactattatggcaagaaaggtattctcaaacgcgtagatgggtcgcaaggaatcgacaacgttgttgcagaagtcctggggattctgggttggagcgataag

SEQ ID NO: 552 - protein, 231 aa, synthetic construct
  REGION 1..231: note = Variant of adenylate kinase
MHHHHHHGGSGMMAFLVFLGPPGAGKGTQSKRIQEKTGIPHISTGDIFRDIVKKENDEMAKKIKEIMEKGELVPDELGNAVVKRRLSEKDCEKGFILDGYPRTVAQAEFLDSFLESQNKQLTAAVLFKVPEDVVVQRLTSRLICPKCGRIYNMIFLPPKEDELCDDCKVGLVQRDDDKEETVRHRLKVYLEKTQPVIDYYGKKGILKRVDGSQGIDNVVAEVLGILGWSDK

SEQ ID NO: 553 - DNA, 693 bp, synthetic construct
  misc_feature 1..693: note = Variant of adenylate kinase
  source 1..693: mol_type = other DNA
atgcaccatcatcaccatcacgggggctccggcatgatggcatatctggtgttcttaggtccgccgggcgcgggaaaaggtacccaatcgaaacgcattcaggaaaagactggcatcccgcatattagcacgggcgatatcttccgtgacatcgtcaagaaagagaacgatgaactggccaagaaaattaaagaaatcatggcaaaaggtgaactcgttccagatgaactgggtaatgcggtagtaaaacgccgcctgtcggagaaagactgcgaaaaaggctttattttggatggttatccgcgtaccgtggctcaagcggaattcctggatagttttcttgaatcccagaacaaacagttgacagccgccgtgctgttcaaagtccccgaagatgttgttgtgcaacgtttaacctctcgcctgatctgtccgaaatgcgggcgtatctacaacatgatttttctgccaccaaaagaagacgagctgtgtgacgattgcaaagtcggcttagtacagcgtgatgatgataaggaagaagtcgttcgtcaccgcctgaaagtctaccttgagaagacccagccggtcattgactattatggcaagaaaggtattctcaaacgcgtagatgggtcgcaaggaatcgacaacgttgttgcagaagtcctggggattctgggttggagcgataag

SEQ ID NO: 554 - protein, 231 aa, synthetic construct
  REGION 1..231: note = Variant of adenylate kinase
MHHHHHHGGSGMMAYLVFLGPPGAGKGTQSKRIQEKTGIPHISTGDIFRDIVKKENDELAKKIKEIMAKGELVPDELGNAVVKRRLSEKDCEKGFILDGYPRTVAQAEFLDSFLESQNKQLTAAVLFKVPEDVVVQRLTSRLICPKCGRIYNMIFLPPKEDELCDDCKVGLVQRDDDKEEVVRHRLKVYLEKTQPVIDYYGKKGILKRVDGSQGIDNVVAEVLGILGWSDK

SEQ ID NO: 555 - DNA, 693 bp, synthetic construct
  misc_feature 1..693: note = Variant of adenylate kinase
  source 1..693: mol_type = other DNA
atgcaccatcatcaccatcacgggggctccggcatgatggcatatctggtgttcttaggtccgccgggcgcgggaaaaggtacccaatcgaaacgcattcaggaaaagactggcatcccgcatattagcacgggcgatatcttccgtgacatcgtcaagaaagagaacgatgagctggccaagaaaattaaagaaatcatggagaaaggtgaactcgttccagatgaactgggtaatgcggtagtaaaacgccgcctgtcggagaaagactgcgaaaaaggctttattttggatggttatccgcgtaccgtggctcaagcggaattcctggatagttttcttgaatcccagaacaaacagttgacagccgccgtgctgttcaaagtccccgaagatgttgttgtgcaacgtttaacctctcgcctgatctgtccgaaatgcgggcgtatctacaacatgatttttctgccaccaaaagaagacgagctgtgtgacgattgcaaagtcggcttagtacagcgtgatgatgataaggaagaaacggttcgtcaccgcctgaaagtctaccttgagaagacccagccggtcattgactattatagtaagaaaggtattctcaaacgcgtagatgggtcgcaaggaatcgacaacgttgttgcagaagtcctggggattctgggttggagcgataag

SEQ ID NO: 556 - protein, 231 aa, synthetic construct
  REGION 1..231: note = Variant of adenylate kinase
MHHHHHHGGSGMMAYLVFLGPPGAGKGTQSKRIQEKTGIPHISTGDIFRDIVKKENDELAKKIKEIMEKGELVPDELGNAVVKRRLSEKDCEKGFILDGYPRTVAQAEFLDSFLESQNKQLTAAVLFKVPEDVVVQRLTSRLICPKCGRIYNMIFLPPKEDELCDDCKVGLVQRDDDKEETVRHRLKVYLEKTQPVIDYYSKKGILKRVDGSQGIDNVVAEVLGILGWSDK

SEQ ID NO: 557 - DNA, 693 bp, synthetic construct
  misc_feature 1..693: note = Variant of adenylate kinase
  source 1..693: mol_type = other DNA
atgcaccatcatcaccatcacgggggctccggcatgatggcatatctggtgttcttaggtccgccgggcgcgggaaaaggtacccaatcgaaacgcattcaggaaaagactggcatcccgcatattagcacgggcgatatcttccgtgacatcgtcaagaaagagaacgatgaactggccaagaaaattaaagaaatcatgtataaaggtgaactcgttccagatgaactgggtaatgcggtagtaaaacgccgcctgtcggagaaagactgcgaaaaaggctttattttggatggttatccgcgtaccgtggctcaagcggaattcctggatagttttcttgaatcccagaacaaacagttgacagccgccgtgctgttcaaagtccccgaagatgttgttgtgcaacgtttaacctctcgcctgatctgtccgaaatgcgggcgtatctacaacatgatttttctgccaccaaaagaagacgagctgtgtgacgattgcaaagtcggcttagtacagcgtgatgatgataaggaagaaacggttcgtcaccgcctgaaagtctaccttgagaagacccagccggtcattgactattatggcaagaaaggtattctcaaacgcgtagatgggtcgcaaggaatcgacaacgttgttgcagaagtcctggggattctgggttggagcgataag

SEQ ID NO: 558 - protein, 231 aa, synthetic construct
  REGION 1..231: note = Variant of adenylate kinase
MHHHHHHGGSGMMAYLVFLGPPGAGKGTQSKRIQEKTGIPHISTGDIFRDIVKKENDELAKKIKEIMYKGELVPDELGNAVVKRRLSEKDCEKGFILDGYPRTVAQAEFLDSFLESQNKQLTAAVLFKVPEDVVVQRLTSRLICPKCGRIYNMIFLPPKEDELCDDCKVGLVQRDDDKEETVRHRLKVYLEKTQPVIDYYGKKGILKRVDGSQGIDNVVAEVLGILGWSDK

SEQ ID NO: 559 - DNA, 693 bp, synthetic construct
  misc_feature 1..693: note = Variant of adenylate kinase
  source 1..693: mol_type = other DNA
atgcaccatcatcaccatcacgggggctccggcatgatggcatatctggtgttcttaggtccgccgggcgcgggaaaaggtacccaatcgaaacgcattcaggaaaagactggcatcccgcatattagcacgggcgatatcttccgtgacatcgtcaagaaagagaacgatgaactggccaagaaaattaaagaaatcatggagaaaggtgaactcgttccagatgaactgggtaatgcggtagtaaaacgccgcctgtcggagaaagactgcgaaaaaggctttattttggatggttatccgcgtaccgtggctcaagcggaattcctggatagttttcttgaatcccagaacaaacagttgacagccgccgtgctgttcaaagtccccgaagatgttgttgtgcaacgtttaacctctcgcctgatctgtccgaaatgcgggcgtatctacaacatgatttttctgccaccaaaagaagacgagctgtgtgacgattgcaaagtcggcttagtacagcgtgatgatgataaggaagaagtcgttcgtcaccgcctgaaagtctaccttgagaagacccagccggtcattgactattatggcaagaaaggtattctcaaacgcgtagatgggtcgcaaggaatcgacaacgttgttgcagaagtcctggggattctgggttggagcgataag

SEQ ID NO: 560 - protein, 231 aa, synthetic construct
  REGION 1..231: note = Variant of adenylate kinase
MHHHHHHGGSGMMAYLVFLGPPGAGKGTQSKRIQEKTGIPHISTGDIFRDIVKKENDELAKKIKEIMEKGELVPDELGNAVVKRRLSEKDCEKGFILDGYPRTVAQAEFLDSFLESQNKQLTAAVLFKVPEDVVVQRLTSRLICPKCGRIYNMIFLPPKEDELCDDCKVGLVQRDDDKEEVVRHRLKVYLEKTQPVIDYYGKKGILKRVDGSQGIDNVVAEVLGILGWSDK

SEQ ID NO: 561 - DNA, 693 bp, synthetic construct
  misc_feature 1..693: note = Variant of adenylate kinase
  source 1..693: mol_type = other DNA
atgcaccatcatcaccatcacgggggctccggcatgatggcatatctggtgttcttaggtccgccgggcgcgggaaaaggtacccaatcgaaacgcattcaggaaaagactggcatcccgcatattagcacgggcgatatcttccgtgacatcgtcaagaaagagaacgatgaactggccaagaaaattaaagagagcatggagaaaggtgaactcgttccagatgaactgggtaatgcggtagtaaaacgccgcctgtcggagaaagactgcgaaaaaggctttattttggatggttatccgcgtaccgtggctcaagcggaattcctggatagttttcttgaatcccagaacaaacagttgacagccgccgtgctgttcaaagtccccgaagatgtagttgtgcaacgtttaacctctcgcctgatctgtccgaaatgcgggcgtatctacaacatgatttttctgccaccaaaagaagacgagctgtgtgacgattgcaaagtcggcttagtacagcgtgatgatgataaggaagaaacggttcgtcaccgcctgaaagtctaccttgagaagacccagccggtcattgactattatggcaagaaaggtattctcaaacgcgtagatgggtcgcaaggaatcgacaacgttgttgcagaagtcctggggattctgggttggagcgataag

SEQ ID NO: 562 - protein, 231 aa, synthetic construct
  REGION 1..231: note = Variant of adenylate kinase
MHHHHHHGGSGMMAYLVFLGPPGAGKGTQSKRIQEKTGIPHISTGDIFRDIVKKENDELAKKIKESMEKGELVPDELGNAVVKRRLSEKDCEKGFILDGYPRTVAQAEFLDSFLESQNKQLTAAVLFKVPEDVVVQRLTSRLICPKCGRIYNMIFLPPKEDELCDDCKVGLVQRDDDKEETVRHRLKVYLEKTQPVIDYYGKKGILKRVDGSQGIDNVVAEVLGILGWSDK

SEQ ID NO: 563 - DNA, 693 bp, synthetic construct
  misc_feature 1..693: note = Variant of adenylate kinase
  source 1..693: mol_type = other DNA
atgcaccatcatcaccatcacgggggctccggcatgatggcatttctggtgttcttaggtccgccgggcgcgggaaaaggtacccaatcgaaacgcattcaggaaaagactggcatcccgcatattagcacgggcgatatcttccgtgacatcgtcaagaaagagaacgatgagatggccaagaaaattaaagaaatcatggagaaaggtgaactcgttccagatgaactgggtaatgcggtagtaaaacgccgcctgtcggagaaagactgcgaaaaaggctttattttggatggttatccgcgtaccgtggctcaagcggaattcctggatagttttcttgaatcccagaacaaacagttgacagccgccgtgctgttcaaagtccccgaagatgttgttgtgcaacgtttaacctctcgcctgatctgtccgaaatgcgggcgtatctacaacatgatttttctgccaccaaaagaagacgagctgtgtgacgattgcaaagtcggcttagtacagcgtgatgatgataaggaagaagtcgttcgtcaccgcctgaaagtctaccttgagaagacccagccggtcattgactattatggcaagaaaggtattctcaaacgcgtagatgggtcgcaaggaatcgacaacgttgttgcagaagtcctggggattctgggttggagcgataag

SEQ ID NO: 564 - protein, 231 aa, synthetic construct
  REGION 1..231: note = Variant of adenylate kinase
MHHHHHHGGSGMMAFLVFLGPPGAGKGTQSKRIQEKTGIPHISTGDIFRDIVKKENDEMAKKIKEIMEKGELVPDELGNAVVKRRLSEKDCEKGFILDGYPRTVAQAEFLDSFLESQNKQLTAAVLFKVPEDVVVQRLTSRLICPKCGRIYNMIFLPPKEDELCDDCKVGLVQRDDDKEEVVRHRLKVYLEKTQPVIDYYGKKGILKRVDGSQGIDNVVAEVLGILGWSDK

SEQ ID NO: 565 - DNA, 693 bp, synthetic construct
  misc_feature 1..693: note = Variant of adenylate kinase
  source 1..693: mol_type = other DNA
atgcaccatcatcaccatcacgggggctccggcatgatggcatatctggtgttcttaggtccgccgggcgcgggaaaaggtacccaatcgaaacgcattcaggaaaagactggcatcccgcatattagcacgggcgatatcttccgtgacatcgtcaagaaagagaacgatgaactggccaagaaaattaaagaaatcatggagaaaggtgaactcgttccagatgaactgggtaatgcggtagtaaaacgccgcctgtcggagaaagactgcgaaaaaggctttattttggatggttatccgcgtaccgtggctcaagcggaattcctggatagttttcttgaatcccagaacaaacagttgacagccgccgtgctgttcaaagtccccgaagatgttgttgtgcaacgtttaacctctcgcctgatctgtccgaaatgcgggcgtatctacaacatgatttttctgccaccaaaagaagacgagctgtgtgacgattgcaaagtcggcttagtacagcgtgatgatgataaggaagaaacggttcgtcaccgcctgaaagtctaccttgagaagacccagccggtcgcggactattatggcaagaaaggtattctcaaacgcgtagatgggtcgcaaggaatcgacaacgttgttgcagaagtcctggggattctgggttggagcgataag

SEQ ID NO: 566 - protein, 231 aa, synthetic construct
  REGION 1..231: note = Variant of adenylate kinase
MHHHHHHGGSGMMAYLVFLGPPGAGKGTQSKRIQEKTGIPHISTGDIFRDIVKKENDELAKKIKEIMEKGELVPDELGNAVVKRRLSEKDCEKGFILDGYPRTVAQAEFLDSFLESQNKQLTAAVLFKVPEDVVVQRLTSRLICPKCGRIYNMIFLPPKEDELCDDCKVGLVQRDDDKEETVRHRLKVYLEKTQPVADYYGKKGILKRVDGSQGIDNVVAEVLGILGWSDK

SEQ ID NO: 567 - DNA, 693 bp, synthetic construct
  misc_feature 1..693: note = Variant of adenylate kinase
  source 1..693: mol_type = other DNA
atgcaccatcatcaccatcacgggggctccggcatgagtgcatttctggtgttcttaggtccgccgggcgcgggaaaaggtacccaatcgaaacgcattcaggaaaagactggcatcccgcatattagcacgggcgatatcttccgtgacatcgtcaagaaagagaacgatgagatggccaagaaaattaaagaaatcatggagaaaggtgaactcgttccagatgaactgggtaatgcggtagtaaaacgccgcctgtcggagaaagactgcgaaaaaggctttattttggatggttatccgcgtaccgtggctcaagcggaattcctggatagttttcttgaatcccagaacaaacagttgacagccgccgtgctgttcaaagtccccgaagatgttgttgtgcaacgtttaacctctcgcctgatctgtccgaaatgcgggcgtatctacaacatgatttttctgccaccaaaagaagacgagctgtgtgacgattgcaaagtcggcttagtacagcgtgatgatgataaggaagaaacggttcgtcaccgcctgaaagtctaccttgagaagacccagccggtcattgactattatggcaagaaaggtattctcaaacgcgtagatgggtcgcaaggaatcgacaacgttgttgcagaagtcctggggattctgggttggagcgataag

SEQ ID NO: 568 - protein, 231 aa, synthetic construct
  REGION 1..231: note = Variant of adenylate kinase
MHHHHHHGGSGMSAFLVFLGPPGAGKGTQSKRIQEKTGIPHISTGDIFRDIVKKENDEMAKKIKEIMEKGELVPDELGNAVVKRRLSEKDCEKGFILDGYPRTVAQAEFLDSFLESQNKQLTAAVLFKVPEDVVVQRLTSRLICPKCGRIYNMIFLPPKEDELCDDCKVGLVQRDDDKEETVRHRLKVYLEKTQPVIDYYGKKGILKRVDGSQGIDNVVAEVLGILGWSDK

SEQ ID NO: 569 - DNA, 693 bp, synthetic construct
  misc_feature 1..693: note = Variant of adenylate kinase
  source 1..693: mol_type = other DNA
atgcaccatcatcaccatcacgggggctccggcatgatggcatatctggtgttcttaggtccgccgggcgcgggaaaaggtacccaatcgaaacgcattcaggaaaagactggcatcccgcatattagcacgggcgatatcttccgtgacatcgtcaagaaagagaacgatgaactggcctcgaaaattaaagaaatcatggagaaaggtgaactcgttccagatgaactgggtaatgcggtagtaaaacgccgcctgtcggagaaagactgcgaaaaaggctttattttggatggttatccgcgtaccgtggctcaagcggaattcctggatagttttcttgaatcccagaacaaacagttgacagccgccgtgctgtttaaagtccccgaagatgttgttgtgcaacgtttaacctctcgcctgatctgtccgaaatgcgggcgtatctacaacatgatttttctgccaccaaaagaagacgagctgtgtgacgattgcaaagtcggtttagtacagcgtgatgatgataaggaagaaacggttcgtcaccgcctgaaagtctaccttgagaagacccagccggtcattgactattatggcaagaaaggtattctcaaacgcgtagatgggtcgcaaggaatcgacaacgttgttgcagaagtcctggggattctgggttggagcgataag

SEQ ID NO: 570 - protein, 231 aa, synthetic construct
  REGION 1..231: note = Variant of adenylate kinase
MHHHHHHGGSGMMAYLVFLGPPGAGKGTQSKRIQEKTGIPHISTGDIFRDIVKKENDELASKIKEIMEKGELVPDELGNAVVKRRLSEKDCEKGFILDGYPRTVAQAEFLDSFLESQNKQLTAAVLFKVPEDVVVQRLTSRLICPKCGRIYNMIFLPPKEDELCDDCKVGLVQRDDDKEETVRHRLKVYLEKTQPVIDYYGKKGILKRVDGSQGIDNVVAEVLGILGWSDK

SEQ ID NO: 571 - DNA, 693 bp, synthetic construct
  misc_feature 1..693: note = Variant of adenylate kinase
  source 1..693: mol_type = other DNA
atgcaccatcatcaccatcacgggggctccggcatgatggcatatctggtgttcttaggtccgccgggcgcgggaaaaggtacccaatcgaaacgcattgtggaaaagactggcatcccgcatattagcacgggcgatatcttccgtgacatcgtcaagaaagagaacgatgaactggcctcgaaaattaaagaaatcatggagaaaggtgaactcgttccagatgaactgggtaatgcggtagtaaaacgccgcctgtcggagaaagactgcgaaaaaggctttattttggatggttatccgcgtaccgtggctcaagcggaattcctggatagttttcttgaatcccagaacaaacagttgacagccgccgtgctgtttaaagtccccgaagatgttgttgtgcaacgtttaacctctcgcctgatctgtccgaaatgcgggcgtatctacaacatgatttttctgccaccaaaagaagacgagctgtgtgacgattgcaaagtcggtttagtacagcgtgatgatgataaggaagaaacggttcgtcaccgcctgaaagtctaccttgagaagacccagccggtcattgactattatggcaagaaaggtattctcaaacgcgtagatgggtcgcaaggaatcgacaacgttgttgcagaagtcctggggattctgggttggagcgataag

SEQ ID NO: 572 - protein, 231 aa, synthetic construct
  REGION 1..231: note = Variant of adenylate kinase
MHHHHHHGGSGMMAYLVFLGPPGAGKGTQSKRIVEKTGIPHISTGDIFRDIVKKENDELASKIKEIMEKGELVPDELGNAVVKRRLSEKDCEKGFILDGYPRTVAQAEFLDSFLESQNKQLTAAVLFKVPEDVVVQRLTSRLICPKCGRIYNMIFLPPKEDELCDDCKVGLVQRDDDKEETVRHRLKVYLEKTQPVIDYYGKKGILKRVDGSQGIDNVVAEVLGILGWSDK

SEQ ID NO: 573 - DNA, 693 bp, synthetic construct
  misc_feature 1..693: note = Variant of adenylate kinase
  source 1..693: mol_type = other DNA
atgcaccatcatcaccatcacgggggctccggcatgagtgcatatctggtgttcttaggtccgccgggcgcgggaaaaggtacccaatcgaaacgcattcaggaaaagactggcatcccgcatattagcacgggcgatatcttccgtgacatcgtcaagaaagagaacgatgaactggccaagaaaattaaagaaatcatggagaaaggtgaactcgttccagatgaactgggtaatgcggtagtaaaacgccgcctgtcggagaaagactgcgaaaaaggctttattttggatggttatccgcgtaccgtggctcaagcggaattcctggatagttttcttgaatcccagaacaaacagttgacagccgccgtgctgttcaaagtccccgaagatgttgttgtgcaacgtttaacctctcgcctgatctgtccgaaatgcgggcgtatctacaacatgatttttctgccaccaaaagaagacgagctgtgtgacgattgcaaagtcggcttagtacagcgtgatgatgataaggaagaaacggttcgtcaccgcctgaaagtctaccttgagaagacccagccggtcattgactattatggcaagaaaggtattctcaaacgcgtagatgggtcgcaaggaatcgacaacgttgttgcagaagtcctggggattctgggttggagcgataag

SEQ ID NO: 574 - protein, 231 aa, synthetic construct
  REGION 1..231: note = Variant of adenylate kinase
MHHHHHHGGSGMSAYLVFLGPPGAGKGTQSKRIQEKTGIPHISTGDIFRDIVKKENDELAKKIKEIMEKGELVPDELGNAVVKRRLSEKDCEKGFILDGYPRTVAQAEFLDSFLESQNKQLTAAVLFKVPEDVVVQRLTSRLICPKCGRIYNMIFLPPKEDELCDDCKVGLVQRDDDKEETVRHRLKVYLEKTQPVIDYYGKKGILKRVDGSQGIDNVVAEVLGILGWSDK

SEQ ID NO: 575 - DNA, 693 bp, synthetic construct
  misc_feature 1..693: note = Variant of adenylate kinase
  source 1..693: mol_type = other DNA
atgcaccatcatcaccatcacgggggctccggcatgatggcatatctggtgttcttaggtccgccgggcgcgggaaaaggtacccaatcgaaacgcattcaggaaaagactggcatcccgcatattagcacgggcgatatcttccgtgacatcgtcaagaaagagaacgatgaactggccgcgaaaattaaagaaatcatggagaaaggtgaactcgttccagatgaactgggtaatgcggtagtaaaacgccgcctgtcggagaaagactgcgaaaaaggctttattttggatggttatccgcgtaccgtggctcaagcggaattcctggatagttttcttgaatcccagaacaaacagttgacagccgccgtgctgtttaaagtccccgaagatgttgttgtgcaacgtttaacctctcgcctgatctgtccgaaatgcgggcgtatctacaacatgatttttctgccaccaaaagaagacgagctgtgtgacgattgcaaagtcggtttagtacagcgtgatgatgataaggaagaaacggttcgtcaccgcctgaaagtctaccttgagaagacccagccggtcattgactattatggcaagaaaggtattctcaaacgcgtagatgggtcgcaaggaatcgacaacgttgttgcagaagtcctggggattctgggttggagcgataag

SEQ ID NO: 576 - protein, 231 aa, synthetic construct
  REGION 1..231: note = Variant of adenylate kinase
MHHHHHHGGSGMMAYLVFLGPPGAGKGTQSKRIQEKTGIPHISTGDIFRDIVKKENDELAAKIKEIMEKGELVPDELGNAVVKRRLSEKDCEKGFILDGYPRTVAQAEFLDSFLESQNKQLTAAVLFKVPEDVVVQRLTSRLICPKCGRIYNMIFLPPKEDELCDDCKVGLVQRDDDKEETVRHRLKVYLEKTQPVIDYYGKKGILKRVDGSQGIDNVVAEVLGILGWSDK

SEQ ID NO: 577 - DNA, 693 bp, synthetic construct
  misc_feature 1..693: note = Variant of adenylate kinase
  source 1..693: mol_type = other DNA
atgcaccatcatcaccatcacgggggctccggcatgatggcatatctggtgttcttaggtccgccgggcgcgggaaaaggtacccaatcgaaacgcattgtggaaaagactggcatcccgcatattagcacgggcgatatcttccgtgacatcgtcaagaaagagaacgatgaactggccaagaaaattaaagaaatcatggagcgtggtgaactcgttccagatgaactgggtaatgcggtagtaaaacgccgcctgtcggagaaagactgcgaaaaaggctttattttggatggttatccgcgtaccgtggctcaagcggaattcctggatagttttcttgaatcccagaacaaacagttgacagccgccgtgctgttcaaagtccccgaagatgttgttgtgcaacgtttaacctctcgcctgatctgtccgaaatgcgggcgtatctacaacatgatttttctgccaccaaaagaagacgagctgtgtgacgattgcaaagtcggcttagtacagcgtgatgatgataaggaagaaacggttcgtcaccgcctgaaagtctaccttgagaagacccagccggtcattgactattatggcaagaaaggtattctcaaacgcgtagatgggtcgcaaggaatcgacaacgttgttgcagaagtcctggggattctgggttggagcgataag

SEQ ID NO: 578 - protein, 231 aa, synthetic construct
  REGION 1..231: note = Variant of adenylate kinase
MHHHHHHGGSGMMAYLVFLGPPGAGKGTQSKRIVEKTGIPHISTGDIFRDIVKKENDELAKKIKEIMERGELVPDELGNAVVKRRLSEKDCEKGFILDGYPRTVAQAEFLDSFLESQNKQLTAAVLFKVPEDVVVQRLTSRLICPKCGRIYNMIFLPPKEDELCDDCKVGLVQRDDDKEETVRHRLKVYLEKTQPVIDYYGKKGILKRVDGSQGIDNVVAEVLGILGWSDK

SEQ ID NO: 579 - DNA, 693 bp, synthetic construct
  misc_feature 1..693: note = Variant of adenylate kinase
  source 1..693: mol_type = other DNA
atgcaccatcatcaccatcacgggggctccggcatgatggcatatctggtgttcttaggtccgccgggcgcgggaaaaggtacccaatcgaaacgcattcaggaaaagactggcatcccgcatattagcacgggcgatatcttccgtgacatcgtcaagaaagagaacgatgaactggccaagaaaattaaagaaatcatggagaaaggtgaactcgttccagatgaactgggtaatgcggtagtaaaacgccgcctgtcggagaaagactgcgaaaaaggctttattttggatggttatccgcgtaccgtggctcaagcggaattcctggatagttttcttgaatcccagaacaaacagttgacagccgccgtgctgttcaaagtccccgaagatgtagttgtgcaacgtttaacctctcgcctgatctgtccgaaatgcgggcgtatctacaacatgatttttctgccaccaaaagaagacgagtcgtgtgacgattgcaaagtcggcttagtacagcgtgatgatgataaggaagaaacggttcgtcaccgcctgaaagtctaccttgagaagacccagccggtcattgactattatggcaagaaaggtattctcaaacgcgtagatgggtcgcaaggaatcgacaacgttgttgcagaagtcctggggattctgggttggagcgataag

SEQ ID NO: 580 - protein, 231 aa, synthetic construct
  REGION 1..231: note = Variant of adenylate kinase
MHHHHHHGGSGMMAYLVFLGPPGAGKGTQSKRIQEKTGIPHISTGDIFRDIVKKENDELAKKIKEIMEKGELVPDELGNAVVKRRLSEKDCEKGFILDGYPRTVAQAEFLDSFLESQNKQLTAAVLFKVPEDVVVQRLTSRLICPKCGRIYNMIFLPPKEDESCDDCKVGLVQRDDDKEETVRHRLKVYLEKTQPVIDYYGKKGILKRVDGSQGIDNVVAEVLGILGWSDK

SEQ ID NO: 581 - DNA, 693 bp, synthetic construct
  misc_feature 1..693: note = Variant of adenylate kinase
  source 1..693: mol_type = other DNA
atgcaccatcatcaccatcacgggggctccggcatgatggcatatctggtgttcttaggtccgccgggcgcgggaaaaggtacccaatcgaaacgcattcaggaaaagactggcatcccgcatattagcacgggcgatatcttccgtgacatcgtcaagaagcaaaacgatgaactggccaagaaaattaaagaaatcatggagaaaggtgaactcgttccagatgaactgggtaatgcggtagtaaaacgccgcctgtcggagaaagactgcgaaaaaggctttattttggatggttatccgcgtaccgtggctcaagcggaattcctggatagttttcttgaatcccagaacaaacggttgacagccgccgtgctgttcaaagtccccgaagatgaagttgtgcaacgtttaacctctcgcctgatctgtccgaaatgcgggcgtatctacaacatgatttttctgccaccaaaagaagacgagctgtgtgacgattgcaaagtcggcttagtacagcgtgatgatgataaggaagaaacggttcgtcaccgcctgaaagtctaccttgagaagacccagccggtcattgactattatggcaagaaaggtattctcaaacgcgtagatgggtcgcaaggaatcgacaacgttgttgcagaagtcctggggattctgggttggagcgataag

SEQ ID NO: 582 - protein, 231 aa, synthetic construct
  REGION 1..231: note = Variant of adenylate kinase
MHHHHHHGGSGMMAYLVFLGPPGAGKGTQSKRIQEKTGIPHISTGDIFRDIVKKQNDELAKKIKEIMEKGELVPDELGNAVVKRRLSEKDCEKGFILDGYPRTVAQAEFLDSFLESQNKRLTAAVLFKVPEDEVVQRLTSRLICPKCGRIYNMIFLPPKEDELCDDCKVGLVQRDDDKEETVRHRLKVYLEKTQPVIDYYGKKGILKRVDGSQGIDNVVAEVLGILGWSDK

SEQ ID NO: 583 - DNA, 693 bp, synthetic construct
  misc_feature 1..693: note = Variant of adenylate kinase
  source 1..693: mol_type = other DNA
atgcaccatcatcaccatcacgggggctccggcatgatggcatatctggtgttcttaggtccgccgggcgcgggaaaaggtacccaatcgaaacgcattcaggaaaagactggcatcccgcatattagcacgggcgatatcttccgtgacatcgtcaagaagcaaaacgatgaactggcctcgaaaattaaagaaatcatggagaaaggtgaactcgttccagatgaactgggtaatgcggtagtaaaacgccgcctgtcggagaaagactgcgaaaaaggctttattttggatggttatccgcgtaccgtggctcaagcggaattcctggatagttttcttgaatcccagaacaaacagttgacagccgccgtgctgttcaaagtccccgaagatgaagttgtgcaacgtttaacctctcgcctgatctgtccgaaatgcgggcgtatctacaacatgatttttctgccaccaaaagaagacgagctgtgtgacgattgcaaagtcggcttagtacagcgtgatgatgataaggaagaaacggttcgtcaccgcctgaaagtctaccttgagaagacccagccggtcattgactattatagtaagaaaggtattctcaaacgcgtagatgggtcgcaaggaatcgacaacgttgttgcagaagtcctggggattctgggttggagcgataag

SEQ ID NO: 584 - protein, 231 aa, synthetic construct
  REGION 1..231: note = Variant of adenylate kinase
MHHHHHHGGSGMMAYLVFLGPPGAGKGTQSKRIQEKTGIPHISTGDIFRDIVKKQNDELASKIKEIMEKGELVPDELGNAVVKRRLSEKDCEKGFILDGYPRTVAQAEFLDSFLESQNKQLTAAVLFKVPEDEVVQRLTSRLICPKCGRIYNMIFLPPKEDELCDDCKVGLVQRDDDKEETVRHRLKVYLEKTQPVIDYYSKKGILKRVDGSQGIDNVVAEVLGILGWSDK

SEQ ID NO: 585 - DNA, 693 bp, synthetic construct
  misc_feature 1..693: note = Variant of adenylate kinase
  source 1..693: mol_type = other DNA
atgcaccatcatcaccatcacgggggctccggcatgatggcatatctggtgttcttaggtccgccgggcgcgggaaaaggtacccaatcgaaacgcatttctgaaaagactggcatcccacatattagcacgggcgatatcttccgtgacatcgtcaagaagcaaaacgatgaactggccaagaaaattaaagaaatcatggagaaaggtgaactcgttccagatgaactgggtaatgcggtagtaaaacgccgcctgtcggagaaagactgcgaaaaaggctttattttggatggttatccgcgtaccgtggctcaagcggaattcctggatagttttcttgaatcccagaacaaacagttgacagccgccgtgctgttcaaagtccccgaagatgaagttgtgcaacgtttaacctctcgcctgatctgtccgaaatgcgggcgtatctacaacatgatttttctgccaccaaaagaagacgagctgtgtgacgattgcaaagtcggcttagtacagcgtgatgatgataaggaagaaacggttcgtcaccgcctgaaagtctaccttgagaagacccagccggtcattgactattatggcaagaaaggtattctcaaacgcgtagatgggtcgcaaggaatcgacaacgttgttgcagaagtcctggggattctgggttggagcgataag

SEQ ID NO: 586 - protein, 231 aa, synthetic construct
  REGION 1..231: note = Variant of adenylate kinase
MHHHHHHGGSGMMAYLVFLGPPGAGKGTQSKRISEKTGIPHISTGDIFRDIVKKQNDELAKKIKEIMEKGELVPDELGNAVVKRRLSEKDCEKGFILDGYPRTVAQAEFLDSFLESQNKQLTAAVLFKVPEDEVVQRLTSRLICPKCGRIYNMIFLPPKEDELCDDCKVGLVQRDDDKEETVRHRLKVYLEKTQPVIDYYGKKGILKRVDGSQGIDNVVAEVLGILGWSDK

SEQ ID NO: 587 - DNA, 693 bp, synthetic construct
  misc_feature 1..693: note = Variant of adenylate kinase
  source 1..693: mol_type = other DNA
atgcaccatcatcaccatcacgggggctccggcatgatggcatatctggtgttcttaggtccgccgggcgcgggaaaaggtacccaatcgaaacgcattcaggaaattactggcatcccacatattagcacgggcgatatcttccgtgacatcgtcaagaagcaaaacgatgaactggccaagaaaattaaagaaatcatggagaaaggtgaactcgttccagatgaactgggtaatgcggtagtaaaacgccgcctgtcggagaaagactgcgaaaaaggctttattttggatggttatccgcgtaccgtggctcaagcggaattcctggatagttttcttgaatcccagaacaaacagttgacagccgccgtgctgttcaaagtccccgaagatgaagttgtgcaacgtttaacctctcgcctgatctgtccgaaatgcgggcgtatctacaacatgatttttctgccaccaaaagaagacgagctgtgtgacgattgcaaagtcggcttagtacagcgtgatgatgataaggaagaaacggttcgtcaccgcctgaaagtctaccttgagaagacccagccggtcattgactattatggcaagaaaggtattctcaaacgcgtagatgggtcgcaaggaatcgacaacgttgttgcagaagtcctggggattctgggttggagcgataag

SEQ ID NO: 588 - protein, 231 aa, synthetic construct
  REGION 1..231: note = Variant of adenylate kinase
MHHHHHHGGSGMMAYLVFLGPPGAGKGTQSKRIQEITGIPHISTGDIFRDIVKKQNDELAKKIKEIMEKGELVPDELGNAVVKRRLSEKDCEKGFILDGYPRTVAQAEFLDSFLESQNKQLTAAVLFKVPEDEVVQRLTSRLICPKCGRIYNMIFLPPKEDELCDDCKVGLVQRDDDKEETVRHRLKVYLEKTQPVIDYYGKKGILKRVDGSQGIDNVVAEVLGILGWSDK

SEQ ID NO: 589 - DNA, 693 bp, synthetic construct
  misc_feature 1..693: note = Variant of adenylate kinase
  source 1..693: mol_type = other DNA
atgcaccatcatcaccatcacgggggctccggcatgatggcatatctggtgttcttaggtccgccgggcgcgggaaaaggtacccaatcgaaacgcattcaggaagtgactggcatcccacatattagcacgggcgatatcttccgtgacatcgtcaagaagcaaaacgatgaactggccaagaaaattaaagaaatcatggagaaaggtgaactcgttccagatgaactgggtaatgcggtagtaaaacgccgcctgtcggagaaagactgcgaaaaaggctttattttggatggttatccgcgtaccgtggctcaagcggaattcctggatagttttcttgaatcccagaacaaacagttgacagccgccgtgctgttcaaagtccccgaagatgaagttgtgcaacgtttaacctctcgcctgatctgtccgaaatgcgggcgtatctacaacatgatttttctgccaccaaaagaagacgagctgtgtgacgattgcaaagtcggcttagtacagcgtgatgatgataaggaagaaacggttcgtcaccgcctgaaagtctaccttgagaagacccagccggtcattgactattatggcaagaaaggtattctcaaacgcgtagatgggtcgcaaggaatcgacaacgttgttgcagaagtcctggggattctgggttggagcgataag

SEQ ID NO: 590 - protein, 231 aa, synthetic construct
  REGION 1..231: note = Variant of adenylate kinase
MHHHHHHGGSGMMAYLVFLGPPGAGKGTQSKRIQEVTGIPHISTGDIFRDIVKKQNDELAKKIKEIMEKGELVPDELGNAVVKRRLSEKDCEKGFILDGYPRTVAQAEFLDSFLESQNKQLTAAVLFKVPEDEVVQRLTSRLICPKCGRIYNMIFLPPKEDELCDDCKVGLVQRDDDKEETVRHRLKVYLEKTQPVIDYYGKKGILKRVDGSQGIDNVVAEVLGILGWSDK

SEQ ID NO: 591 - DNA, 693 bp, synthetic construct
  misc_feature 1..693: note = Variant of adenylate kinase
  source 1..693: mol_type = other DNA
atgcaccatcatcaccatcacgggggctccggcatgatggcatatctggtgttcttaggtccgccgggcgcgggaaaaggtacccaatcgaaacgcattcaggaagctactggcatcccacatattagcacgggcgatatcttccgtgacatcgtcaagaagcaaaacgatgaactggccaagaaaattaaagaaatcatggagaaaggtgaactcgttccagatgaactgggtaatgcggtagtaaaacgccgcctgtcggagaaagactgcgaaaaaggctttattttggatggttatccgcgtaccgtggctcaagcggaattcctggatagttttcttgaatcccagaacaaacagttgacagccgccgtgctgttcaaagtccccgaagatgaagttgtgcaacgtttaacctctcgcctgatctgtccgaaatgcgggcgtatctacaacatgatttttctgccaccaaaagaagacgagctgtgtgacgattgcaaagtcggcttagtacagcgtgatgatgataaggaagaaacggttcgtcaccgcctgaaagtctaccttgagaagacccagccggtcattgactattatggcaagaaaggtattctcaaacgcgtagatgggtcgcaaggaatcgacaacgttgttgcagaagtcctggggattctgggttggagcgataag

SEQ ID NO: 592 - protein, 231 aa, synthetic construct
  REGION 1..231: note = Variant of adenylate kinase
MHHHHHHGGSGMMAYLVFLGPPGAGKGTQSKRIQEATGIPHISTGDIFRDIVKKQNDELAKKIKEIMEKGELVPDELGNAVVKRRLSEKDCEKGFILDGYPRTVAQAEFLDSFLESQNKQLTAAVLFKVPEDEVVQRLTSRLICPKCGRIYNMIFLPPKEDELCDDCKVGLVQRDDDKEETVRHRLKVYLEKTQPVIDYYGKKGILKRVDGSQGIDNVVAEVLGILGWSDK

SEQ ID NO: 593 - DNA, 693 bp, synthetic construct
  misc_feature 1..693: note = Variant of adenylate kinase
  source 1..693: mol_type = other DNA
atgcaccatcatcaccatcacgggggctccggcatgatggcatatctggtgttcttaggtccgccgggcgcgggaaaaggtacccaatcgaaacgcattcaggaactgactggcatcccacatattagcacgggcgatatcttccgtgacatcgtcaagaagcaaaacgatgaactggccaagaaaattaaagaaatcatggagaaaggtgaactcgttccagatgaactgggtaatgcggtagtaaaacgccgcctgtcggagaaagactgcgaaaaaggctttattttggatggttatccgcgtaccgtggctcaagcggaattcctggatagttttcttgaatcccagaacaaacagttgacagccgccgtgctgttcaaagtccccgaagatgaagttgtgcaacgtttaacctctcgcctgatctgtccgaaatgcgggcgtatctacaacatgatttttctgccaccaaaagaagacgagctgtgtgacgattgcaaagtcggcttagtacagcgtgatgatgataaggaagaaacggttcgtcaccgcctgaaagtctaccttgagaagacccagccggtcattgactattatggcaagaaaggtattctcaaacgcgtagatgggtcgcaaggaatcgacaacgttgttgcagaagtcctggggattctgggttggagcgataag

SEQ ID NO: 594 - protein, 231 aa, synthetic construct
  REGION 1..231: note = Variant of adenylate kinase
MHHHHHHGGSGMMAYLVFLGPPGAGKGTQSKRIQELTGIPHISTGDIFRDIVKKQNDELAKKIKEIMEKGELVPDELGNAVVKRRLSEKDCEKGFILDGYPRTVAQAEFLDSFLESQNKQLTAAVLFKVPEDEVVQRLTSRLICPKCGRIYNMIFLPPKEDELCDDCKVGLVQRDDDKEETVRHRLKVYLEKTQPVIDYYGKKGILKRVDGSQGIDNVVAEVLGILGWSDK

SEQ ID NO: 595 - DNA, 693 bp, synthetic construct
  misc_feature 1..693: note = Variant of adenylate kinase
  source 1..693: mol_type = other DNA
atgcaccatcatcaccatcacgggggctccggcatgatggcatatctggtgttcttaggtccgccgggcgcgggaaaaggtacccaatcgaaacgcattcaggaaatgactggcatcccacatattagcacgggcgatatcttccgtgacatcgtcaagaagcaaaacgatgaactggccaagaaaattaaagaaatcatggagaaaggtgaactcgttccagatgaactgggtaatgcggtagtaaaacgccgcctgtcggagaaagactgcgaaaaaggctttattttggatggttatccgcgtaccgtggctcaagcggaattcctggatagttttcttgaatcccagaacaaacagttgacagccgccgtgctgttcaaagtccccgaagatgaagttgtgcaacgtttaacctctcgcctgatctgtccgaaatgcgggcgtatctacaacatgatttttctgccaccaaaagaagacgagctgtgtgacgattgcaaagtcggcttagtacagcgtgatgatgataaggaagaaacggttcgtcaccgcctgaaagtctaccttgagaagacccagccggtcattgactattatggcaagaaaggtattctcaaacgcgtagatgggtcgcaaggaatcgacaacgttgttgcagaagtcctggggattctgggttggagcgataag

SEQ ID NO: 596 - protein, 231 aa, synthetic construct
  REGION 1..231: note = Variant of adenylate kinase
MHHHHHHGGSGMMAYLVFLGPPGAGKGTQSKRIQEMTGIPHISTGDIFRDIVKKQNDELAKKIKEIMEKGELVPDELGNAVVKRRLSEKDCEKGFILDGYPRTVAQAEFLDSFLESQNKQLTAAVLFKVPEDEVVQRLTSRLICPKCGRIYNMIFLPPKEDELCDDCKVGLVQRDDDKEETVRHRLKVYLEKTQPVIDYYGKKGILKRVDGSQGIDNVVAEVLGILGWSDK

SEQ ID NO: 597 - DNA, 693 bp, synthetic construct
  misc_feature 1..693: note = Variant of adenylate kinase
  source 1..693: mol_type = other DNA
atgcaccatcatcaccatcacgggggctccggcatgatggcatatctggtgttcttaggtccgccgggcgcgggaaaaggtacccaatcgaaacgcattcaggaaaagactggcatcccgcatattagcacgggcgatatcttccgtgacatcgtcaagaagcaaaacgatgaactggccaagaaaattaaagaaatcatggagaaaggtgaactcgttccagatgaactgggtaatgcggtagtaaaacgccgcctgtcggagaaagactgcgaaaaaggctttattttggatggttatccgcgtaccgttagtcaagcggaattcctggatagttttcttgaatcccagaacaaacagttgacagccgccgtgctgttcaaagtccccgaagatgaagttgtgcaacgtttaacctctcgcctgatctgtccgaaatgcgggcgtatctacaacatgatttttctgccaccaaaagaagacgagctgtgtgacgattgcaaagtcggcttagtacagcgtgatgatgataaggaagaaacggttcgtcaccgcctgaaagtctaccttgagaagacccagccggtcattgactattatggcaagaaaggtattctcaaacgcgtagatgggtcgcaaggaatcgacaacgttgttgcagaagtcctggggattctgggttggagcgataag

SEQ ID NO: 598 - protein, 231 aa, synthetic construct
  REGION 1..231: note = Variant of adenylate kinase
MHHHHHHGGSGMMAYLVFLGPPGAGKGTQSKRIQEKTGIPHISTGDIFRDIVKKQNDELAKKIKEIMEKGELVPDELGNAVVKRRLSEKDCEKGFILDGYPRTVSQAEFLDSFLESQNKQLTAAVLFKVPEDEVVQRLTSRLICPKCGRIYNMIFLPPKEDELCDDCKVGLVQRDDDKEETVRHRLKVYLEKTQPVIDYYGKKGILKRVDGSQGIDNVVAEVLGILGWSDK

SEQ ID NO: 599 - DNA, 693 bp, synthetic construct
  misc_feature 1..693: note = Variant of adenylate kinase
  source 1..693: mol_type = other DNA
atgcaccatcatcaccatcacgggggctccggcatgatggcatatctggtgttcttaggtccgccgggcgcgggaaaaggtacccaatcgaaacgcattgctgaaaagactggcatcccacatattagcacgggcgatatcttccgtgacatcgtcaagaagcaaaacgatgaactggccaagaaaattaaagaaatcatggagaaaggtgaactcgttccagatgaactgggtaatgcggtagtaaaacgccgcctgtcggagaaagactgcgaaaaaggctttattttggatggttatccgcgtaccgtggctcaagcggaattcctggatagttttcttgaatcccagaacaaacagttgacagccgccgtgctgttcaaagtccccgaagatgaagttgtgcaacgtttaacctctcgcctgatctgtccgaaatgcgggcgtatctacaacatgatttttctgccaccaaaagaagacgagctgtgtgacgattgcaaagtcggcttagtacagcgtgatgatgataaggaagaaacggttcgtcaccgcctgaaagtctaccttgagaagacccagccggtcattgactattatggcaagaaaggtattctcaaacgcgtagatgggtcgcaaggaatcgacaacgttgttgcagaagtcctggggattctgggttggagcgataag

SEQ ID NO: 600 - protein, 231 aa, synthetic construct
  REGION 1..231: note = Variant of adenylate kinase
MHHHHHHGGSGMMAYLVFLGPPGAGKGTQSKRIAEKTGIPHISTGDIFRDIVKKQNDELAKKIKEIMEKGELVPDELGNAVVKRRLSEKDCEKGFILDGYPRTVAQAEFLDSFLESQNKQLTAAVLFKVPEDEVVQRLTSRLICPKCGRIYNMIFLPPKEDELCDDCKVGLVQRDDDKEETVRHRLKVYLEKTQPVIDYYGKKGILKRVDGSQGIDNVVAEVLGILGWSDK

SEQ ID NO: 601 - DNA, 693 bp, synthetic construct
  misc_feature 1..693: note = Variant of adenylate kinase
  source 1..693: mol_type = other DNA
atgcaccatcatcaccatcacgggggctccggcatgatggcatatctggtgttcttaggtccgccgggcgcgggaaaaggtacccaatcgaaacgcattcaggaaaagactggcatcccgcatattagcacgggcgatatcttccgtgacatcgtcaagaagcaaaacgatgaactggccaagaaaattaaagaaatcatggagaaaggtgaactcgttccagatgaactgggtaatgcggtagtaaaacgccgcctgtcggagaaagactgcgaaaaaggctttattttggatggttatccgcgtaccgtggctcaagcggaattcctggacgagtttcttgaatcccagaacaaacagttgacagccgccgtgctgttcaaagtccccgaagatgaagttgtgcaacgtttaacctctcgcctgatctgtccgaaatgcgggcgtatctacaacatgatttttctgccaccaaaagaagacgagctgtgtgacgattgcaaagtcggcttagtacagcgtgatgatgataaggaagaaacggttcgtcaccgcctgaaagtctaccttgagaagacccagccggtcattgactattatggcaagaaaggtattctcaaacgcgtagatgggtcgcaaggaatcgacaacgttgttgcagaagtcctggggattctgggttggagcgataag

SEQ ID NO: 602 - protein, 231 aa, synthetic construct
  REGION 1..231: note = Variant of adenylate kinase
MHHHHHHGGSGMMAYLVFLGPPGAGKGTQSKRIQEKTGIPHISTGDIFRDIVKKQNDELAKKIKEIMEKGELVPDELGNAVVKRRLSEKDCEKGFILDGYPRTVAQAEFLDEFLESQNKQLTAAVLFKVPEDEVVQRLTSRLICPKCGRIYNMIFLPPKEDELCDDCKVGLVQRDDDKEETVRHRLKVYLEKTQPVIDYYGKKGILKRVDGSQGIDNVVAEVLGILGWSDK

SEQ ID NO: 603 - DNA, 693 bp, synthetic construct
  misc_feature 1..693: note = Variant of adenylate kinase
  source 1..693: mol_type = other DNA
atgcaccatcatcaccatcacgggggctccggcatgatggcatatctggtgttcttaggtccgccgggcgcgggaaaaggtacccaatcgaggcgcattcaggaaaagactggcatcccgcatattagcacgggcgatatcttccgtgacatcgtcaagaagcaaaacgatgaactggccaagaaaattaaagaaatcatggagaaaggtgaactcgttccagatgaactgggtaatgcggtagtaaaacgccgcctgtcggagaaagactgcgaaaaaggctttattttggatggttatccgcgtaccgtggctcaagcggaattcctggatagttttcttgaatcccagaacaaacagttgacagccgccgtgctgttcaaagtccccgaagatgaagttgtgcaacgtttaacctctcgcctgatctgtccgaaatgcgggcgtatctacaacatgatttttctgccaccaaaagaagacgagctgtgtgacgattgcaaagtcggcttagtacagcgtgatgatgataaggaagaaacggttcgtcaccgcctgaaagtctaccttgagaagacccagccggtcattgactattatggcaagaaaggtattctcaaacgcgtagatgggtcgcaaggaatcgacaacgttgttgcagaagtcctggggattctgggttggagcgataag

SEQ ID NO: 604 - protein, 231 aa, synthetic construct
  REGION 1..231: note = Variant of adenylate kinase
MHHHHHHGGSGMMAYLVFLGPPGAGKGTQSRRIQEKTGIPHISTGDIFRDIVKKQNDELAKKIKEIMEKGELVPDELGNAVVKRRLSEKDCEKGFILDGYPRTVAQAEFLDSFLESQNKQLTAAVLFKVPEDEVVQRLTSRLICPKCGRIYNMIFLPPKEDELCDDCKVGLVQRDDDKEETVRHRLKVYLEKTQPVIDYYGKKGILKRVDGSQGIDNVVAEVLGILGWSDK

SEQ ID NO: 605 - DNA, 693 bp, synthetic construct
  misc_feature 1..693: note = Variant of adenylate kinase
  source 1..693: mol_type = other DNA
atgcaccatcatcaccatcacgggggctccggcatgatggcatatctggtgttcttaggtccgccgggcgcgggaaaaggtacccaatcgaaacgcattcaggaaaagactggcatcccgcatattagcacgggcgatatcttccgtgacatcgtcaagaagcaaaacgatgaactggccaagaaaattaaagaaatcatggagaaaggtgaactcgttccagatgaactgggtaatgcggtagtaaaacgccgcctgtcggagaaagactgcgaaaaaggctttattttggatggttatccgcgtaccgtggctcaagcggaattcctggatagttttcttgaatcccagaacaaacagttgacagccgccgtgctgttcaaagtccccgaagatgaagttgtgcaacgtttaacctctcgcctgatctgtccggattgcgggcgtatctacaatatgatttttctgccaccaaaagaagacgagctgtgtgacgattgcaaagtcggcttagtacagcgtgatgatgataaggaagaaacggttcgtcaccgcctgaaagtctaccttgagaagacccagccggtcattgactattatggcaagaaaggtattctcaaacgcgtagatgggtcgcaaggaatcgacaacgttgttgcagaagtcctggggattctgggttggagcgataag

SEQ ID NO: 606 - protein, 231 aa, synthetic construct
  REGION 1..231: note = Variant of adenylate kinase
MHHHHHHGGSGMMAYLVFLGPPGAGKGTQSKRIQEKTGIPHISTGDIFRDIVKKQNDELAKKIKEIMEKGELVPDELGNAVVKRRLSEKDCEKGFILDGYPRTVAQAEFLDSFLESQNKQLTAAVLFKVPEDEVVQRLTSRLICPDCGRIYNMIFLPPKEDELCDDCKVGLVQRDDDKEETVRHRLKVYLEKTQPVIDYYGKKGILKRVDGSQGIDNVVAEVLGILGWSDK

SEQ ID NO: 607 - DNA, 693 bp, synthetic construct
  misc_feature 1..693: note = Variant of adenylate kinase
  source 1..693: mol_type = other DNA
atgcaccatcatcaccatcacgggggctccggcatgatggcatatctggtgttcttaggtccgccgggcgcgggaaaaggtacccaatcgaaacgcattcaggaaaagactggcatcccgcatattagcacgggcgatatcttccgtgacatcgtcaagaagcaaaacgatgaactggccaagaaaattaaagaaatcatggagaaaggtgaactcgttccagatgaactgggtaatgcggtagtaaaacgccgcctgtcggagaaagactgcgaaaaaggctttattttggatggttatccgcgtaccgtggctcaagcggaattcctggacaggtttcttgaatcccagaacaaacagttgacagccgccgtgctgttcaaagtccccgaagatgaagttgtgcaacgtttaacctctcgcctgatctgtccgaaatgcgggcgtatctacaacatgatttttctgccaccaaaagaagacgagctgtgtgacgattgcaaagtcggcttagtacagcgtgatgatgataaggaagaaacggttcgtcaccgcctgaaagtctaccttgagaagacccagccggtcattgactattatggcaagaaaggtattctcaaacgcgtagatgggtcgcaaggaatcgacaacgttgttgcagaagtcctggggattctgggttggagcgataag

SEQ ID NO: 608 - protein, 231 aa, synthetic construct
  REGION 1..231: note = Variant of adenylate kinase
MHHHHHHGGSGMMAYLVFLGPPGAGKGTQSKRIQEKTGIPHISTGDIFRDIVKKQNDELAKKIKEIMEKGELVPDELGNAVVKRRLSEKDCEKGFILDGYPRTVAQAEFLDRFLESQNKQLTAAVLFKVPEDEVVQRLTSRLICPKCGRIYNMIFLPPKEDELCDDCKVGLVQRDDDKEETVRHRLKVYLEKTQPVIDYYGKKGILKRVDGSQGIDNVVAEVLGILGWSDK

SEQ ID NO: 609 - DNA, 693 bp, synthetic construct
  misc_feature 1..693: note = Variant of adenylate kinase
  source 1..693: mol_type = other DNA
atgcaccatcatcaccatcacgggggctccggcatgggggcatatctggtgttcttaggtccgccgggcgcgggaaaaggtacccaaggccgtcgcattcaggaaaagactggcatcccgcatattagcacgggcgatatcttccgtgacatcgtcgctaagcaaaacgatgaactggcctcgaaaattaaagaaatcatggagaaaggtgaactcgttccagatgaactgggtaatgcggtagtaaaacgccgcctgtcggagaaagactgcgaaaaaggctttattttggatggttatccgcgtaccgtggctcaagcggaatatctggatagttttcttgaatcccagaatcgccagttgacagccgccgtgctgttcaaagtccccgaagatgaagttgtgcaacgtttaacctctcgcctgatctgtccgaaatgcgggcgtatctacaacatgatttttctgccaccaaaagaagacgagctgtgtgacgattgcggtgtcggcttagtacagcgtgatgatgataaggaagaaacggtccgtcaccgcctgaaagtctaccttgagaagacccagccggtcattgactattatagtaagaaaggtattctcaaacgcgtagatgggtcgcaaggaatcgacaacgttgttgcagaagtcctggggattctgggttggagcgataag

SEQ ID NO: 610 - protein, 231 aa, synthetic construct
  REGION 1..231: note = Variant of adenylate kinase
MHHHHHHGGSGMGAYLVFLGPPGAGKGTQGRRIQEKTGIPHISTGDIFRDIVAKQNDELASKIKEIMEKGELVPDELGNAVVKRRLSEKDCEKGFILDGYPRTVAQAEYLDSFLESQNRQLTAAVLFKVPEDEVVQRLTSRLICPKCGRIYNMIFLPPKEDELCDDCGVGLVQRDDDKEETVRHRLKVYLEKTQPVIDYYSKKGILKRVDGSQGIDNVVAEVLGILGWSDK

SEQ ID NO: 611 - DNA, 693 bp, synthetic construct
  misc_feature 1..693: note = Variant of adenylate kinase
  source 1..693: mol_type = other DNA
atgcaccatcatcaccatcacgggggctccggcatgatggcatatctggtgttcttaggtccgccgggcgcgggaaaaggtacccaatcgaaacgcattcaggaatacactggcatcccgcatattagcacgggcgatatcttccgtgacatcgtcaagaagcaaaacgatgaactggcctcgaaaattaaagaaatcatggagaaaggtgaactcgttccagatgaactgggtaatgcggtagtaaaacgccgcctgtcggagaaagactgcgaaaaaggctttattttggatggttatccgcgtaccgtggctcaagcggaattcctggatagttttcttgaatcccagaacaaacagttgacagccgccgtggagttcaaagtccccgaagatgaagttgtgcaacgtttaacctctcgcctgatctgtccgaaatgcgggcgtatctacaacatgatttttctgccaccaaaagaagacgagctgtgtgacgattgcaaagtcggcttagtacagcgtgatgatgataaggaagaaacggttcgtcaccgcctgaaagtctacgcagagaagacccagccggtcattgactattatagtaagaaaggtattctcaaacgcgtagatgggtcgcaaggaatcgacaacgttgttgcagaagtcctggggattctgggttggagcgataag

SEQ ID NO: 612 - protein, 231 aa, synthetic construct
  REGION 1..231: note = Variant of adenylate kinase
MHHHHHHGGSGMMAYLVFLGPPGAGKGTQSKRIQEYTGIPHISTGDIFRDIVKKQNDELASKIKEIMEKGELVPDELGNAVVKRRLSEKDCEKGFILDGYPRTVAQAEFLDSFLESQNKQLTAAVEFKVPEDEVVQRLTSRLICPKCGRIYNMIFLPPKEDELCDDCKVGLVQRDDDKEETVRHRLKVYAEKTQPVIDYYSKKGILKRVDGSQGIDNVVAEVLGILGWSDK

SEQ ID NO: 613 - DNA, 693 bp, synthetic construct
  misc_feature 1..693: note = Variant of adenylate kinase
  source 1..693: mol_type = other DNA
atgcaccatcatcaccatcacgggggctccggcatgatggcatatctggtgttcttaggtccgccgggcgcgggaaaaggtacccaatcgaaacgcattcaggaaaagactggcatcccgcatattagcacgggcgatatcttccgtgacatcgtcaagaagcaaaacgatgaactggcctcgaaaattaaagaaatcatggagaaaggtgaactcgttccagatgaactgggtaatgcggtagtaaaacgccgcctgtcggagaaagactgcgaaaaaggctttattttggatggttatccgcgtaccgtggctcaagcggaattcctggatagttttcttgaatcccagaacaaacaattgacagccgccgtggagttcaaagtccccgaagatgaagttgtgcaacgtttaacctctcgcctgatctgtccgaaatgcggccgtatctacaacatgatttttctgccaccaaaagaagacgagctgtgtgacgattgcaaagtcggcttagtacagcgtgatgatgataaggaagaaacggttcgtcaccgcctgaaagtctacctggagaagacccagccggtcattgactattatagtaagaaaggtattctcaaacgcgtagatgggtcgcaaggaatcgacaacgttgttgcagaagtcctggggattctgggttggagcgataag

SEQ ID NO: 614 - protein, 231 aa, synthetic construct
  REGION 1..231: note = Variant of adenylate kinase
MHHHHHHGGSGMMAYLVFLGPPGAGKGTQSKRIQEKTGIPHISTGDIFRDIVKKQNDELASKIKEIMEKGELVPDELGNAVVKRRLSEKDCEKGFILDGYPRTVAQAEFLDSFLESQNKQLTAAVEFKVPEDEVVQRLTSRLICPKCGRIYNMIFLPPKEDELCDDCKVGLVQRDDDKEETVRHRLKVYLEKTQPVIDYYSKKGILKRVDGSQGIDNVVAEVLGILGWSDK

SEQ ID NO: 615 - DNA, 693 bp, synthetic construct
  misc_feature 1..693: note = Variant of adenylate kinase
  source 1..693: mol_type = other DNA
atgcaccatcatcaccatcacgggggctccggcatgatggcatatctggtgttcttaggtccgccgggcgcgggaaaaggtacccaatcgaaacgcattcaggaacaaactggcatgccgcatattagcacgggcgatatcttccgtgacatcgtcaagaagcaaaacgatgaactggcctcgaaaattaaagaaatcatggagaaaggtgaactcgttccagatgaactgggtaatgcggtagtaaaacgccgcctgtcggagaaagactgcgaaaaaggctttattttggatggttatccgcgtaccgtggctcaagcggaattcctggatagttttcttgaatcccagaacaaacaattgacagccgccgtggagttcaaagtccccgaagatgaagttgtgcaacgtttaacctctcgcctgatctgtccgaaatgcgggcgtatctacaacatgatttttctgccaccaaaagaagacgagctgtgtgacgattgcaaagtcggcttagtacagcgtgatgatgataaggaagaaacggttcgtcaccgcctgaaagtctacctggagaagacccagccggtcattgactattatagtaagaaaggtattctcaaacgcgtagatgggtcgcaaggaatcgacaacgttgttgcagaagtcctggggattctgggttggagcgataag

SEQ ID NO: 616 - protein, 231 aa, synthetic construct
  REGION 1..231: note = Variant of adenylate kinase
MHHHHHHGGSGMMAYLVFLGPPGAGKGTQSKRIQEQTGMPHISTGDIFRDIVKKQNDELASKIKEIMEKGELVPDELGNAVVKRRLSEKDCEKGFILDGYPRTVAQAEFLDSFLESQNKQLTAAVEFKVPEDEVVQRLTSRLICPKCGRIYNMIFLPPKEDELCDDCKVGLVQRDDDKEETVRHRLKVYLEKTQPVIDYYSKKGILKRVDGSQGIDNVVAEVLGILGWSDK

SEQ ID NO: 617 - DNA, 693 bp, synthetic construct
  misc_feature 1..693: note = Variant of adenylate kinase
  source 1..693: mol_type = other DNA
atgcaccatcatcaccatcacggcggctccggcatgatggcatatctggtgttcttaggtccgccgggcgcgggaaaaggtacccaatcgaaacgcattcaggaaaagactggcatcccgcatattagcacgggcgatatcttccgtgacatcgtcaagaagcaaaacgatgaactggcctcgaaaattaaagaaatcatggagaaaggtgaactcgttccagatgaactgggtaatgcggtagtaaaacgccgcctgtcggagaaagactgcgaaaaaggctttattttggatggttatccgcgtaccgtggctcaagcggaattcctggatagttttcttgaatcccagaacaaacagttgacagccgccgtggagttcaaagtccccgaagatgaagttgtgcaacgtttaacctctcgcctgatctgtccgaaatgcgggcgtatctacaacatgatttttctgccaccaaaagaagacgagctgtgtgacgattgcaaagtcggcttagtacagcgtgatgatgataaggaagaaacggttcgtcaccgcctgaaagtctacgcagagaagacccagccggtcattgactattatagtaagaaaggtattctcaaacgcgtagatgggtcgcaaggaatcgacaacgttgttgcagaagtcctggggattctgggttggagcgataag

SEQ ID NO: 618 - protein, 231 aa, synthetic construct
  REGION 1..231: note = Variant of adenylate kinase
MHHHHHHGGSGMMAYLVFLGPPGAGKGTQSKRIQEKTGIPHISTGDIFRDIVKKQNDELASKIKEIMEKGELVPDELGNAVVKRRLSEKDCEKGFILDGYPRTVAQAEFLDSFLESQNKQLTAAVEFKVPEDEVVQRLTSRLICPKCGRIYNMIFLPPKEDELCDDCKVGLVQRDDDKEETVRHRLKVYAEKTQPVIDYYSKKGILKRVDGSQGIDNVVAEVLGILGWSDK

SEQ ID NO: 619 - DNA, 693 bp, synthetic construct
  misc_feature 1..693: note = Variant of adenylate kinase
  source 1..693: mol_type = other DNA
atgcaccatcatcaccatcacgggggctccggcatgatggcatatctggtgttcttaggtccgccgggcgcgggaaaaggtacccaatcgaaacgcattcaggaatacactggcatgccgcatattagcacgggcgatatcttccgtgacatcgtcaagaagcaaaacgatgaactggcctcgaaaattaaagaaatcatggagaaaggtgaactcgttccagatgaactgggtaatgcggtagtaaaacgccgcctgtcggagaaagactgcgaaaaaggctttattttggatggttatccgcgtaccgtggctcaagcggaattcctggatagttttcttgaatcccagaacaaacaattgacagccgccgtggagttcaaagtccccgaagatgaagttgtgcaacgtttaacctctcgcctgatctgtccgaaatgcggccgtatctacaacatgatttttctgccaccaaaagaagacgagctgtgtgacgattgcaaagtcggcttagtacaacgtgatgatgataaggaagaaacggttcgtcaccgcctgaaagtctacctggagaagacccagccggtcattgactattatagtaagaaaggtattctcaaacgcgtagatgggtcgcaaggaatcgacaacgttgttgcagaagtcctggggattctgggttggagcgataag

SEQ ID NO: 620 - protein, 231 aa, synthetic construct
  REGION 1..231: note = Variant of adenylate kinase
MHHHHHHGGSGMMAYLVFLGPPGAGKGTQSKRIQEYTGMPHISTGDIFRDIVKKQNDELASKIKEIMEKGELVPDELGNAVVKRRLSEKDCEKGFILDGYPRTVAQAEFLDSFLESQNKQLTAAVEFKVPEDEVVQRLTSRLICPKCGRIYNMIFLPPKEDELCDDCKVGLVQRDDDKEETVRHRLKVYLEKTQPVIDYYSKKGILKRVDGSQGIDNVVAEVLGILGWSDK

SEQ ID NO: 621 - DNA, 693 bp, synthetic construct
  misc_feature 1..693: note = Variant of adenylate kinase
  source 1..693: mol_type = other DNA
atgcaccatcatcaccatcacgggggctccggcatgatggcatatctggtgttcttaggtccgccgggcgcgggaaaaggtacccaatcgaaacgcattcaggaacaaactggcatcccgcatattagcacgggcgatatcttccgtgacatcgtcaagaagcaaaacgatgaactggcctcgaaaattaaagaaatcatggagaaaggtgaactcgttccagatgaactgggtaatgcggtagtaaaacgccgcctgtcggagaaagactgcgaaaaaggctttattttggatggttatccgcgtaccgtggctcaagcggaattcctggatagttttcttgaatcccagaacaaacagttgacagccgccgtggagttcaaagtccccgaagatgaagttgtgcaacgtttaacctctcgcctgatctgtccgaaatgcgggcgtatctacaacatgatttttctgccaccaaaagaagacgagctgtgtgacgattgcaaagtcggcttagtacaacgtgatgatgataaggaagaaacggttcgtcaccgcctgaaagtctaccttgagaagacccagccggtcattgactattatagtaagaaaggtattctcaaacgcgtagatgggtcgcaaggaatcgacaacgttgttgcagaagtcctggggattctgggttggagcgataag

SEQ ID NO: 622 - protein, 231 aa, synthetic construct
  REGION 1..231: note = Variant of adenylate kinase
MHHHHHHGGSGMMAYLVFLGPPGAGKGTQSKRIQEQTGIPHISTGDIFRDIVKKQNDELASKIKEIMEKGELVPDELGNAVVKRRLSEKDCEKGFILDGYPRTVAQAEFLDSFLESQNKQLTAAVEFKVPEDEVVQRLTSRLICPKCGRIYNMIFLPPKEDELCDDCKVGLVQRDDDKEETVRHRLKVYLEKTQPVIDYYSKKGILKRVDGSQGIDNVVAEVLGILGWSDK

SEQ ID NO: 623 - DNA, 693 bp, synthetic construct
  misc_feature 1..693: note = Variant of adenylate kinase
  source 1..693: mol_type = other DNA
atgcaccatcatcaccatcacgggggctccggcatgatggcatatctggtgttcttaggtccgccgggcgcgggaaaaggtacccaatcgaaacgcattcaggaatacactggcatcccgcatattagcacgggcgatatcttccgtgacatcgtcaagaagcaaaacgatgaactggcctcgaaaattaaagaaatcatggagaaaggtgaactcgttccagatgaactgggtaatgcggtagtaaaacgccgcctgtcggagaaagactgcgaaaaaggctttattttggatggttatccgcgtaccgtggctcaagcggaattcctggatagttttcttgaatcccagaacaaacaattgacagccgccgtgctgttcaaagtccccgaagatgaagttgtgcaacgtttaacctctcgcctgatctgtccgaaatgcggccgtatctacaacatgatttttctgccaccaaaagaagacgagctgtgtgacgattgcaaagtcggcttagtacagcgtgatgatgataaggaagaaacggttcgtcaccgcctgaaagtctacgcagagaagacccagccggtcattgactattatagtaagaaaggtattctcaaacgcgtagatgggtcgcaaggaatcgacaacgttgttgcagaagtcctggggattctgggttggagcgataag

SEQ ID NO: 624 - protein, 231 aa, synthetic construct
  REGION 1..231: note = Variant of adenylate kinase
MHHHHHHGGSGMMAYLVFLGPPGAGKGTQSKRIQEYTGIPHISTGDIFRDIVKKQNDELASKIKEIMEKGELVPDELGNAVVKRRLSEKDCEKGFILDGYPRTVAQAEFLDSFLESQNKQLTAAVLFKVPEDEVVQRLTSRLICPKCGRIYNMIFLPPKEDELCDDCKVGLVQRDDDKEETVRHRLKVYAEKTQPVIDYYSKKGILKRVDGSQGIDNVVAEVLGILGWSDK

SEQ ID NO: 625 - DNA, 693 bp, synthetic construct
  misc_feature 1..693: note = Variant of adenylate kinase
  source 1..693: mol_type = other DNA
atgcaccatcatcaccatcacgggggctccggcatgatggcatatctggtgttcttaggtccgccgggcgcgggaaaaggtacccaatcgaaacgcattcaggaaaagactggcatgccgcatattagcacgggcgatatcttccgtgacatcgtcaagaagcaaaacgatgaactggcctcgaaaattaaagaaatcatggagaaaggtgaactcgttccagatgaactgggtaatgcggtagtaaaacgccgcctgtcggagaaagactgcgaaaaaggctttattttggatggttatccgcgtaccgtggctcaagcggaattcctggatagttttcttgaatcccagaacaaacagttgacagccgccgtggagttcaaagtccccgaagatgaagttgtgcaacgtttaacctctcgcctgatctgtccgaaatgcgggcgtatctacaacatgatttttctgccaccaaaagaagacgagctgtgtgacgattgcaaagtcggcttagtacagcgtgatgatgataaggaagaaacggttcgtcaccgcctgaaagtctaccttgagaagacccagccggtcattgactattatagtaagaaaggtattctcaaacgcgtagatgggtcgcaaggaatcgacaacgttgttgcagaagtcctggggattctgggttggagcgataag

SEQ ID NO: 626 - protein, 231 aa, synthetic construct
  REGION 1..231: note = Variant of adenylate kinase
MHHHHHHGGSGMMAYLVFLGPPGAGKGTQSKRIQEKTGMPHISTGDIFRDIVKKQNDELASKIKEIMEKGELVPDELGNAVVKRRLSEKDCEKGFILDGYPRTVAQAEFLDSFLESQNKQLTAAVEFKVPEDEVVQRLTSRLICPKCGRIYNMIFLPPKEDELCDDCKVGLVQRDDDKEETVRHRLKVYLEKTQPVIDYYSKKGILKRVDGSQGIDNVVAEVLGILGWSDK

SEQ ID NO: 627 - DNA, 693 bp, synthetic construct
  misc_feature 1..693: note = Variant of adenylate kinase
  source 1..693: mol_type = other DNA
atgcaccatcatcaccatcacgggggctccggcatgggggcatatctggtgttcttaggtccgccgggcgcgggaaaaggtacccaaagcaagcgcattcaggaaaagactggcatcccgcatattagcacgggcgatatcttccgtgacatcgtcaagaagcaaaacgatgaactggcctcgaaaattaaagaaatcatggagaaaggtgaactcgttccagatgaactgggtaatgcggtagtaaaacgccgcctgtcggagaaagactgcgaaaaaggctttattttggatggttatccgcgtaccgtggctcaagcggaatatctggatagttttcttgaatcccagaatcgccagttgacagccgccgtgctgttcaaagtccccgaagatgaagttgtgcaacgtttaacctctcgcctgatctgtccgaaatgcgggcgtatctacaacatgatttttctgccaccaaaagaagacgagctgtgtgacgattgcaaggtcggcttagtacagcgtgatgatgataaggaagaaacggtccgtcaccgcctgaaagtctaccttgagaagacccagccggtcattgactattatagtaagaaaggtattctcaaacgcgtagatgggtcgcaaggaatcgacaacgttgttgcagaagtcctggggattctgggttggagcgataag

SEQ ID NO: 628 - protein, 231 aa, synthetic construct
  REGION 1..231: note = Variant of adenylate kinase
MHHHHHHGGSGMGAYLVFLGPPGAGKGTQSKRIQEKTGIPHISTGDIFRDIVKKQNDELASKIKEIMEKGELVPDELGNAVVKRRLSEKDCEKGFILDGYPRTVAQAEYLDSFLESQNRQLTAAVLFKVPEDEVVQRLTSRLICPKCGRIYNMIFLPPKEDELCDDCKVGLVQRDDDKEETVRHRLKVYLEKTQPVIDYYSKKGILKRVDGSQGIDNVVAEVLGILGWSDK

SEQ ID NO: 629 - DNA, 693 bp, synthetic construct
  misc_feature 1..693: note = Variant of adenylate kinase
  source 1..693: mol_type = other DNA
atgcaccatcatcaccatcacgggggctccggcatgatggcatatctggtgttcttaggtccgccgggcgcgggaaaaggtacccaatcgaaacgcattcaggaaaagactggcatcccgcatattagcacgggcgatatcttccgtgacatcgtcaaaaagcaaaacgatgaactggcctcgaaaattaaagaaatcatggagaaaggtgaactcgttccagatgaactgggtaatgcggtagtaaaacgccgcctgtcggagaaagactgcgaaaaaggctttattttggatggttatccgcgtaccgtggctcaagcggaatatctggatagttttcttgaatcccagaacaaacagttgacagccgccgtgctgttcaaagtccccgaagatgaagttgtgcaacgtttaacctctcgcctgatctgtccgaaatgcgggcgtatctacaacatgatttttctgccaccaaaagaagacgagctgtgtgacgattgcaaggtcggcttagtacagcgtgatgatgataaggaagaaacggttcgtcaccgcctgaaagtctaccttgagaagacccagccggtcattgactattatagtaagaaaggtattctcaaacgcgtagatgggtcgcaaggaatcgacaacgttgttgcagaagtcctggggattctgggttggagcgataag

SEQ ID NO: 630 - protein, 231 aa, synthetic construct
  REGION 1..231: note = Variant of adenylate kinase
MHHHHHHGGSGMMAYLVFLGPPGAGKGTQSKRIQEKTGIPHISTGDIFRDIVKKQNDELASKIKEIMEKGELVPDELGNAVVKRRLSEKDCEKGFILDGYPRTVAQAEYLDSFLESQNKQLTAAVLFKVPEDEVVQRLTSRLICPKCGRIYNMIFLPPKEDELCDDCKVGLVQRDDDKEETVRHRLKVYLEKTQPVIDYYSKKGILKRVDGSQGIDNVVAEVLGILGWSDK

SEQ ID NO: 631 - DNA, 693 bp, synthetic construct
  misc_feature 1..693: note = Variant of adenylate kinase
  source 1..693: mol_type = other DNA
atgcaccatcatcaccatcacgggggctccggcatgatggcatatctggtgttcttaggtccgccgggcgcgggaaaaggtacccaatcgaaacgcattcaggaatacactggcatcccgcatattagcacgggcgatatcttccgtgacatcgtcaagaagcaaaacgatgaactggcctcgaaaattaaagaaatcatggagaaaggtgaactcgttccagatgaactgggtaatgcggtagtaaaacgccgcctgtcggagaaagactgcgaaaaaggctttattttggatggttatccgcgtaccgtggctcaagcggaattcctggatagttttcttgaatcccagaacaaaggtttgacagccgccgtgctgttcaaagtccccgaagatgaagttgtgcaacgtttaacctctcgcctgatctgtccgaaatgcgggcgtatctacaacatgatttttctgccaccaaaagaagacgagctgtgtgacgattgcaaagtcggcttagtacagcgtgatgatgataaggaagaaacggttcgtcaccgcctgaaagtctacgcagagaagacccagccggtcattgactattatagtaagaaaggtattctcaaacgcgtagatgggtcgcaaggaatcgacaacgttgttgcagaagtcctggggattctgggttggagcgataag

SEQ ID NO: 632 - protein, 231 aa, synthetic construct
  REGION 1..231: note = Variant of adenylate kinase
MHHHHHHGGSGMMAYLVFLGPPGAGKGTQSKRIQEYTGIPHISTGDIFRDIVKKQNDELASKIKEIMEKGELVPDELGNAVVKRRLSEKDCEKGFILDGYPRTVAQAEFLDSFLESQNKGLTAAVLFKVPEDEVVQRLTSRLICPKCGRIYNMIFLPPKEDELCDDCKVGLVQRDDDKEETVRHRLKVYAEKTQPVIDYYSKKGILKRVDGSQGIDNVVAEVLGILGWSDK

SEQ ID NO: 633 - DNA, 693 bp, synthetic construct
  misc_feature 1..693: note = Variant of adenylate kinase
  source 1..693: mol_type = other DNA
atgcaccatcatcaccatcacggcggctccggcatgatggcatatctggtgttcttaggtccgccgggcgcgggaaaaggtacccaatcgaaacgcattcaggaaaagactggcatcccgcatattagcacgggcgatatcttccgtgacatcgtcaagaagcaaaacgatgaactggcctcgaaaattaaagaaatcatggagaaaggtgaactcgttccagatgaactgggtaatgcggtagtaaaacgccgcctgtcggagaaagactgcgaaaaaggctttattttggatggttatccgcgtaccgtggctcaagcggaattcctggatagttttcttgaatcccagaacaaacagttgacagccgccgtggagttcaaagtccccgaagatgaagttgtgcaacgtttaacctctcgcctgatctgtccgaaatgcacgcgtatctacaacatgatttttctgccaccaaaagaagacgagctgtgtgacgattgcaaagtcggcttagtacagcgtgatgatgataaggaagaaacggttcgtcaccgcctgaaagtctaccttgagaagacccagccggtcattgactattatagtaagaaaggtattctcaaacgcgtagatgggtcgcaaggaatcgacaacgttgttgcagaagtcctggggattctgggttggagcgataag

SEQ ID NO: 634 - protein, 231 aa, synthetic construct
  REGION 1..231: note = Variant of adenylate kinase
MHHHHHHGGSGMMAYLVFLGPPGAGKGTQSKRIQEKTGIPHISTGDIFRDIVKKQNDELASKIKEIMEKGELVPDELGNAVVKRRLSEKDCEKGFILDGYPRTVAQAEFLDSFLESQNKQLTAAVEFKVPEDEVVQRLTSRLICPKCTRIYNMIFLPPKEDELCDDCKVGLVQRDDDKEETVRHRLKVYLEKTQPVIDYYSKKGILKRVDGSQGIDNVVAEVLGILGWSDK

SEQ ID NO: 635 - DNA, 693 bp, synthetic construct
  misc_feature 1..693: note = Variant of adenylate kinase
  source 1..693: mol_type = other DNA
atgcaccatcatcaccatcacgggggctccggcatgatggcatatctggtgttcttaggtccgccgggcgcgggaaaaggtacccaatcgaaacgcattcaggaaaagactggcatcccgcatattagcacgggcgatatcttccgtgacatcgtcaagaagcaaaacgatgaactggcctcgaaaattaaagaaatcatggagaaaggtgaactcgttccagatgaactgggtaatgcggtagtaaaacgccgcctgtcggagaaagactgcgaaaaaggctttattttggatggttatccgcgtaccgtggctcaagcggaattcctggatagttttcttgaatcccagaacaaacaattgacagccgccgtgctgttcaaagtccccgaagatgaagttgtgcaacgtttaacctctcgcctgatctgtccgaaatgcgggcgtatctacaacatgatttttctgccaccaaaagaagacgagctgtgtgacgattgcaaagtcggcttagtacagcgtgatgatgataaggaagaaacggttcgtcaccgcctgaaagtctacgcagagaagacccagccggtcattgactattatagtaagaaaggtattctcaaacgcgtagatgggtcgcaaggaatcgacaacgttgttgcagaagtcctggggattctgggttggagcgataag

SEQ ID NO: 636 - protein, 231 aa, synthetic construct
  REGION 1..231: note = Variant of adenylate kinase
MHHHHHHGGSGMMAYLVFLGPPGAGKGTQSKRIQEKTGIPHISTGDIFRDIVKKQNDELASKIKEIMEKGELVPDELGNAVVKRRLSEKDCEKGFILDGYPRTVAQAEFLDSFLESQNKQLTAAVLFKVPEDEVVQRLTSRLICPKCGRIYNMIFLPPKEDELCDDCKVGLVQRDDDKEETVRHRLKVYAEKTQPVIDYYSKKGILKRVDGSQGIDNVVAEVLGILGWSDK

SEQ ID NO: 637 - DNA, 693 bp, synthetic construct
  misc_feature 1..693: note = Variant of adenylate kinase
  source 1..693: mol_type = other DNA
atgcaccatcatcaccatcacgggggctccggcatgatggcatatctggtgttcttaggtccgccgggcgcgggaaaaggtacccaatcgaaacgcattcaggaaaagactggcatcccgcatattagcacgggcgatatcttccgtgacatcgtcaagaagcaaaacgatgaactggcctcgaaaattaaagaaatcatggagaaaggtgaactcgttccagatgaactgggtaatgcggtagtaaaacgccgcctgtcggagaaagactgcgaaaaaggctttattttggatggttatccgcgtaccgtggctcaagcgcgtttcctggatagttttcttgaatcccagaacaaacagttgacagccgccgtggagttcaaagtccccgaagatgaagttgtgcaacgtttaacctctcgcctgatctgtccgaaatgcgggcgtatctacaacatgatttttctgccaccaaaagaagacgagctgtgtgacgattgcaaagtcggcttagtacaacgtgatgatgataaggaagaaacggttcgtcaccgcctgaaagtctacctggagaagacccagccggtcattgactattatagtaagaaaggtattctcaaacgcgtagatgggtcgcaaggaatcgacaacgttgttgcagaagtcctggggattctgggttggagcgataag

SEQ ID NO: 638 - protein, 231 aa, synthetic construct
  REGION 1..231: note = Variant of adenylate kinase
MHHHHHHGGSGMMAYLVFLGPPGAGKGTQSKRIQEKTGIPHISTGDIFRDIVKKQNDELASKIKEIMEKGELVPDELGNAVVKRRLSEKDCEKGFILDGYPRTVAQARFLDSFLESQNKQLTAAVEFKVPEDEVVQRLTSRLICPKCGRIYNMIFLPPKEDELCDDCKVGLVQRDDDKEETVRHRLKVYLEKTQPVIDYYSKKGILKRVDGSQGIDNVVAEVLGILGWSDK

SEQ ID NO: 639 - DNA, 693 bp, synthetic construct
  misc_feature 1..693: note = Variant of adenylate kinase
  source 1..693: mol_type = other DNA
atgcaccatcatcaccatcacgggggctccggcatgatggcatatctggtgttcttaggtccgccgggcgcgggaaaaggtacccaaggccgtcgcattcaggaaaagactggcatcccgcatattagcacgggcgatatcttccgtgacatcgtcaagaagcaaaacgatgaactggcctcgaaaattaaagaaatcatggagaaaggtgaactcgttccagatgaactgggtaatgcggtagtaaaacgccgcctgtcggagaaagactgcgaaaaaggctttattttggatggttatccgcgtaccgtggctcaagcggaatttctggatagttttcttgaatcccagaacaagcagttgacagccgccgtgctgttcaaagtccccgaagatgaagttgtgcaacgtttaacctctcgcctgatctgtccgaaatgcgggcgtatctacaacatgatttttctgccaccaaaagaagacgagctgtgtgacgattgcaaggtcggcttagtacagcgtgatgatgataaggaagaaacggttcgtcaccgcctgaaagtctaccttgagaagacccagccggtcattgactattatagtaagaaaggtattctcaaacgcgtagatgggtcgcaaggaatcgacaacgttgttgcagaagtcctggggattctgggttggagcgataag

SEQ ID NO: 640 - protein, 231 aa, synthetic construct
  REGION 1..231: note = Variant of adenylate kinase
MHHHHHHGGSGMMAYLVFLGPPGAGKGTQGRRIQEKTGIPHISTGDIFRDIVKKQNDELASKIKEIMEKGELVPDELGNAVVKRRLSEKDCEKGFILDGYPRTVAQAEFLDSFLESQNKQLTAAVLFKVPEDEVVQRLTSRLICPKCGRIYNMIFLPPKEDELCDDCKVGLVQRDDDKEETVRHRLKVYLEKTQPVIDYYSKKGILKRVDGSQGIDNVVAEVLGILGWSDK

SEQ ID NO: 641 - DNA, 693 bp, synthetic construct
  misc_feature 1..693: note = Variant of adenylate kinase
  source 1..693: mol_type = other DNA
atgcaccatcatcaccatcacgggggctccggcatgggggcatatctggtgttcttaggtccgccgggcgcgggaaaaggtacccaatcgaaacgcattcaggaaaagactggcatcccgcatattagcacgggcgatatcttccgtgacatcgtcaagaagcaaaacgatgaactggcctcgaaaattaaagaaatcatggagaaaggtgaactcgttccagatgaactgggtaatgcggtagtaaaacgccgcctgtcggagaaagactgcgaaaaaggctttattttggatggttatccgcgtaccgtggctcaagcggaattcctggatagttttcttgaatcccaggcaaagcagttgacagccgccgtgctgttcaaagtccccgaagatgaagttgtgcaacgtttaacctctcgcctgatctgtccgaaatgcgggcgtatctacaacatgatttttctgccaccaaaagaagacgagctgtgtgacgattgcaaagtcggcttagtacagcgtgatgatgataaggaagaaacgatccgtcaccgcctgaaagtctaccttgagaagacccagccggtcattgactattatagtaagaaaggtattctcaaacgcgtagatgggtcgcaaggaatcgacaacgttgttgcagaagtcctggggattctgggttggagcgataag

SEQ ID NO: 642 - protein, 231 aa, synthetic construct
  REGION 1..231: note = Variant of adenylate kinase
MHHHHHHGGSGMGAYLVFLGPPGAGKGTQSKRIQEKTGIPHISTGDIFRDIVKKQNDELASKIKEIMEKGELVPDELGNAVVKRRLSEKDCEKGFILDGYPRTVAQAEFLDSFLESQAKQLTAAVLFKVPEDEVVQRLTSRLICPKCGRIYNMIFLPPKEDELCDDCKVGLVQRDDDKEETIRHRLKVYLEKTQPVIDYYSKKGILKRVDGSQGIDNVVAEVLGILGWSDK

SEQ ID NO: 643 - DNA, 693 bp, synthetic construct
  misc_feature 1..693: note = Variant of adenylate kinase
  source 1..693: mol_type = other DNA
atgcaccatcatcaccatcacgggggctccggcatgatggcatatctggtgttcttaggtccgccgggcgcgggaaaaggtacccaaagccgtcgcattcaggaaaagactggcatcccgcatattagcacgggcgatatcttccgtgacatcgtcgctaagcaaaacgatgaactggcctcgaaaattaaagaaatcatggagaaaggtgaactcgttccagatgaactgggtaatgcggtagtaaaacgccgcctgtcggagaaagactgcgaaaaaggctttattttggatggttatccgcgtaccgtggctcaagcggaattcctggatagttttcttgaatcccagaataagcagttgacagccgccgtgctgttcaaagtccccgaagatgaagttgtgcaacgtttaacctctcgcctgatctgtccgaaatgcgggcgtatctacaacatgatttttctgccaccaaaagaagacgagctgtgtgacgattgcaaagtcggcttagtacagcgtgatgatgataaggaagaaacggttcgtcaccgcctgaaagtctaccttgagaagacccagccggtcattgactattatagtaagaaaggtattctcaaacgcgtagatgggtcgcaaggaatcgacaacgttgttgcagaagtcctggggattctgggttggagcgataag

SEQ ID NO: 644 - protein, 231 aa, synthetic construct
  REGION 1..231: note = Variant of adenylate kinase
MHHHHHHGGSGMMAYLVFLGPPGAGKGTQSRRIQEKTGIPHISTGDIFRDIVAKQNDELASKIKEIMEKGELVPDELGNAVVKRRLSEKDCEKGFILDGYPRTVAQAEFLDSFLESQNKQLTAAVLFKVPEDEVVQRLTSRLICPKCGRIYNMIFLPPKEDELCDDCKVGLVQRDDDKEETVRHRLKVYLEKTQPVIDYYSKKGILKRVDGSQGIDNVVAEVLGILGWSDK

SEQ ID NO: 645 - DNA, 693 bp, synthetic construct
  misc_feature 1..693: note = Variant of adenylate kinase
  source 1..693: mol_type = other DNA
atgcaccatcatcaccatcacgggggctccggcatgatggcatatctggtgttcttaggtccgccgggcgcgggaaaaggtacccaatcgaaacgcattcaggaaaaaactggcatgccgcatattagcacgggcgatatcttccgtgacatcgtcaagaagcaaaacgatgaactggcctcgaaaattaaagaaatcatggagaaaggtgaactcgttccagatgaactgggtaatgcggtagtaaaacgccgcctgtcggagaaagactgcgaaaaaggctttattttggatggttatccgcgtaccgtggctcaagcggaattcctggatagttttcttgaatcccagaacaaacaattgacagccgccgtgctgttcaaagtccccgaagatgaagttgtgcaacgtttaacctctcgcctgatctgtccgaaatgcgggcgtatctacaacatgatttttctgccaccaaaagaagacgagctgtgtgacgattgcaaagtcggcttagtacagcgtgatgatgataaggaagaaacggttcgtcaccgcctgaaagtctaccttgagaagacccagccggtcattgactattatagtaagaaaggtattctcaaacgcgtagatgggtcgcaaggaatcgacaacgttgttgcagaagtcctggggattctgggttggagcgataag

SEQ ID NO: 646 - protein, 231 aa, synthetic construct
  REGION 1..231: note = Variant of adenylate kinase
MHHHHHHGGSGMMAYLVFLGPPGAGKGTQSKRIQEKTGMPHISTGDIFRDIVKKQNDELASKIKEIMEKGELVPDELGNAVVKRRLSEKDCEKGFILDGYPRTVAQAEFLDSFLESQNKQLTAAVLFKVPEDEVVQRLTSRLICPKCGRIYNMIFLPPKEDELCDDCKVGLVQRDDDKEETVRHRLKVYLEKTQPVIDYYSKKGILKRVDGSQGIDNVVAEVLGILGWSDK

SEQ ID NO: 647 - DNA, 693 bp, synthetic construct
  misc_feature 1..693: note = Variant of adenylate kinase
  source 1..693: mol_type = other DNA
atgcaccatcatcaccatcacgggggctccggcatgatggcatatctggtgttcttaggtccgccgggcgcgggaaaaggtacccaatcgaaacgcattcaggaaaagactggcatcccgcatattagcacgggcgatatcttccgtgacatcgtcaagaagcaaaacgatgaactggcctcgaaaattaaagaaatcatggagaaaggtgaactcgttccagatgaactgggtaatgcggtagtaaaacgccgcctgtcggagaaagactgcgaaaaaggctttattttggatggttatccgcgtaccgtggctcaagcggaattcctggatagttttcttgaatcccagaatcgccagttgacagccgccgtgctgttcaaagtccccgaagatgaagttgtgcaacgtttaacctctcgcctgatctgtccgaaatgcgggcgtatctacaacatgatttttctgccaccaaaagaagacgagctgtgtgacgattgcaaggtcggcttagtacagcgtgatgatgataaggaagaaacggttcgtcaccgcctgaaagtctaccttgagaagacccagccggtcattgactattatagtaagaaaggtattctcaaacgcgtagatgggtcgcaaggaatcgacaacgttgttgcagaagtcctggggattctgggttggagcgataag

SEQ ID NO: 648 - protein, 231 aa, synthetic construct
  REGION 1..231: note = Variant of adenylate kinase
MHHHHHHGGSGMMAYLVFLGPPGAGKGTQSKRIQEKTGIPHISTGDIFRDIVKKQNDELASKIKEIMEKGELVPDELGNAVVKRRLSEKDCEKGFILDGYPRTVAQAEFLDSFLESQNRQLTAAVLFKVPEDEVVQRLTSRLICPKCGRIYNMIFLPPKEDELCDDCKVGLVQRDDDKEETVRHRLKVYLEKTQPVIDYYSKKGILKRVDGSQGIDNVVAEVLGILGWSDK

SEQ ID NO: 649 - DNA, 693 bp, synthetic construct
  misc_feature 1..693: note = Variant of adenylate kinase
  source 1..693: mol_type = other DNA
atgcaccatcatcaccatcacgggggctccggcatgggggcatatctggtgttcttaggtccgccgggcgcgggaaaaggtacccaatcgaaacgcattcaggaaaagactggcatcccgcatattagcacgggcgatatcttccgtgacatcgtcaaaaagcaaaacgatgaactggcctcgaaaattaaagaaatcatggagaaaggtgaactcgttccagatgaactgggtaatgcggtagtaaaacgccgcctgtcggagaaagactgcgaaaaaggctttattttggatggttatccgcgtaccgtggctcaagcggaattcctggatagttttcttgaatcccagaatcgccagttgacagccgccgtgctgttcaaagtccccgaagatgaagttgtgcaacgtttaacctctcgcctgatctgtccgaaatgcgggcgtatctacaacatgatttttctgccaccaaaagaagacgagctgtgtgacgattgcggtgtcggcttagtacagcgtgatgatgataaggaagaaacggttcgtcaccgcctgaaagtctaccttgagaagacccagccggtcattgactattatagtaagaaaggtattctcaaacgcgtagatgggtcgcaaggaatcgacaacgttgttgcagaagtcctggggattctgggttggagcgataag

SEQ ID NO: 650 - protein, 231 aa, synthetic construct
  REGION 1..231: note = Variant of adenylate kinase
MHHHHHHGGSGMGAYLVFLGPPGAGKGTQSKRIQEKTGIPHISTGDIFRDIVKKQNDELASKIKEIMEKGELVPDELGNAVVKRRLSEKDCEKGFILDGYPRTVAQAEFLDSFLESQNRQLTAAVLFKVPEDEVVQRLTSRLICPKCGRIYNMIFLPPKEDELCDDCGVGLVQRDDDKEETVRHRLKVYLEKTQPVIDYYSKKGILKRVDGSQGIDNVVAEVLGILGWSDK

SEQ ID NO: 651 - DNA, 693 bp, synthetic construct
  misc_feature 1..693: note = Variant of adenylate kinase
  source 1..693: mol_type = other DNA
atgcaccatcatcaccatcacgggggctccggcatgatggcatatctggtgttcttaggtccgccgggcgcgggaaaaggtacccaaagcaagcgcattcaggaaaagactggcatcccgcatattagcacgggcgatatcttccgtgacatcgtcgctaagcaaaacgatgaactggcctcgaaaattaaagaaatcatggagaaaggtgaactcgttccagatgaactgggtaatgcggtagtaaaacgccgcctgtcggagaaagactgcgaaaaaggctttattttggatggttatccgcgtaccgtggctcaagcggaattcctggatagttttcttgaatcccagaacaaacagttgacagccgccgtgctgttcaaagtccccgaagatgaagttgtgcaacgtttaacctctcgcctgatctgtccgaaatgcgggcgtatctacaacatgatttttctgccaccaaaagaagacgagctgtgtgacgattgcggtgtcggcttagtacagcgtgatgatgataaggaagaaacggttcgtcaccgcctgaaagtctaccttgagaagacccagccggtcattgactattatagtaagaaaggtattctcaaacgcgtagatgggtcgcaaggaatcgacaacgttgttgcagaagtcctggggattctgggttggagcgataag

SEQ ID NO: 652 - protein, 231 aa, synthetic construct
  REGION 1..231: note = Variant of adenylate kinase
MHHHHHHGGSGMMAYLVFLGPPGAGKGTQSKRIQEKTGIPHISTGDIFRDIVAKQNDELASKIKEIMEKGELVPDELGNAVVKRRLSEKDCEKGFILDGYPRTVAQAEFLDSFLESQNKQLTAAVLFKVPEDEVVQRLTSRLICPKCGRIYNMIFLPPKEDELCDDCGVGLVQRDDDKEETVRHRLKVYLEKTQPVIDYYSKKGILKRVDGSQGIDNVVAEVLGILGWSDK

SEQ ID NO: 653 - DNA, 693 bp, synthetic construct
  misc_feature 1..693: note = Variant of adenylate kinase
  source 1..693: mol_type = other DNA
atgcaccatcatcaccatcacgggggctccggcatgatggcatatctggtgttcttaggtcctccgggcgcgggaaaaggtacccaatcgaaacgcatttcggaaaagactggcatcccgcatattagcacgggcgatatcttccgtgacatcgtcaagaagcaaaacgatgaactggcctcgaaaattaaagaaatcatggagaaaggtgaactcgttccagatgaactgggtaatgcggtagtaaaacgccgcctgtcggagaaagactgcgaaaaaggctttattttggatggttatccgcgtaccgtggctcaagcggaattcctggatagctttcttgaatcccagaacaaacagttgacagccgccgtgctgttcaaagtccccgaagatgaagttgtgcaacgtttaacctctcgcctgatctgtccgaaatgcgggcgtatctacaacatgatttttctgccaccaaaagaagacgagctgtgtgacgattgcaaagtcggcttagtacagcgtgatgatgataaggaagaaacggttcgtcaccgcctgaaagtctaccttgagaagacccagccggtcattgactattatagtaagaaaggtattctcaaacgcgtagatgggtcgcaaggaatcgacaacgttgttgcagaagtcctggggattctgggttggagcgataag

SEQ ID NO: 654 - protein, 231 aa, synthetic construct
  REGION 1..231: note = Variant of adenylate kinase
MHHHHHHGGSGMMAYLVFLGPPGAGKGTQSKRISEKTGIPHISTGDIFRDIVKKQNDELASKIKEIMEKGELVPDELGNAVVKRRLSEKDCEKGFILDGYPRTVAQAEFLDSFLESQNKQLTAAVLFKVPEDEVVQRLTSRLICPKCGRIYNMIFLPPKEDELCDDCKVGLVQRDDDKEETVRHRLKVYLEKTQPVIDYYSKKGILKRVDGSQGIDNVVAEVLGILGWSDK

SEQ ID NO: 655 - DNA, 693 bp, synthetic construct
  misc_feature 1..693: note = Variant of adenylate kinase
  source 1..693: mol_type = other DNA
atgcaccatcatcaccatcacgggggctccggcatgatggcatatctggtgttcttaggtcctccgggcgcgggaaaaggtacccaatcgaaacgcatttcggaaaagactggcatcccgcatattagcacgggcgatatcttccgtgacatcgtcaagaagcaaaacgatgaactggcctcgaaaattaaagcaatcatggagaaaggtgaactcgttccagatgaactgggtaatgcggtagtaaaacgccgcctgtcggagaaagactgcgaaaaaggctttattttggatggttatccgcgtaccgtagctcaagcggaattcctggatagttttcttgaatcccagaacaaacagctgactgccgccgtgctgttcaaagtccccgaagatgaagttgtgcaacgtttaacctctcgcctgatctgtccggactgcgggcgtatctacaacatgatttttctgccaccaaaagaagacgagctgtgtgacgattgcaaagtcggcttagtacagcgtgatgatgataaggaagaaacggttcgtcaccgcctgaaagtctaccttgagaagacccagccggtcattgactattatagtaagaaaggtattctcaaacgcgtagatgggtcgcaaggaatcgacaacgttgttgcagaagtcctggggattctgggttggagcgataag

SEQ ID NO: 656 - protein, 231 aa, synthetic construct
  REGION 1..231: note = Variant of adenylate kinase
MHHHHHHGGSGMMAYLVFLGPPGAGKGTQSKRISEKTGIPHISTGDIFRDIVKKQNDELASKIKAIMEKGELVPDELGNAVVKRRLSEKDCEKGFILDGYPRTVAQAEFLDSFLESQNKQLTAAVLFKVPEDEVVQRLTSRLICPDCGRIYNMIFLPPKEDELCDDCKVGLVQRDDDKEETVRHRLKVYLEKTQPVIDYYSKKGILKRVDGSQGIDNVVAEVLGILGWSDK

SEQ ID NO: 657 - DNA, 693 bp, synthetic construct
  misc_feature 1..693: note = Variant of adenylate kinase
  source 1..693: mol_type = other DNA
atgcaccatcatcaccatcacgggggctccggcatgatggcatatctggtgttcttaggtccgccgggcgcgggaaaaggtacccaatcgaaacgcattcaggaacaaactggcatgccgcatattagcacgggcgatatcttccgtgacatcgtcaagaagcaaaacgatgaactggcctcgaaaattaaagaaatcatggagaaaggtgaactcgttccagatgaactgggtaatgcggtagtaaaacgccgcctgtcggagaaagactgcgaaaaaggctttattttggatggttatccgcgtaccgtggctcaagcggaattcctggatagttttcttgaatcccagaacaaacagttgacagccgccgtgctgttcaaagtccccgaagatgaagttgtgcaacgtttaacctctcgcctgatctgtccgaaatgcgggcgtatctacaacatgatttttctgccaccaaaagaagacgagctgtgtgacgattgcaaagtcggcttagtacagcgtgatgatgataaggaagaaacggttcgtcaccgcctgaaagtctaccttgagaagacccagccggtcattgactattatagtaagaaaggtattctcaaacgcgtagatgggtcgcaaggaatcgacaacgttgttgcagaagtcctggggattctgggttggagcgataag

SEQ ID NO: 658 - protein, 231 aa, synthetic construct
  REGION 1..231: note = Variant of adenylate kinase
MHHHHHHGGSGMMAYLVFLGPPGAGKGTQSKRIQEQTGMPHISTGDIFRDIVKKQNDELASKIKEIMEKGELVPDELGNAVVKRRLSEKDCEKGFILDGYPRTVAQAEFLDSFLESQNKQLTAAVLFKVPEDEVVQRLTSRLICPKCGRIYNMIFLPPKEDELCDDCKVGLVQRDDDKEETVRHRLKVYLEKTQPVIDYYSKKGILKRVDGSQGIDNVVAEVLGILGWSDK

SEQ ID NO: 659 - DNA, 693 bp, synthetic construct
  misc_feature 1..693: note = Variant of adenylate kinase
  source 1..693: mol_type = other DNA
atgcaccatcatcaccatcacgggggctccggcatgatggcatatctggtgttcttaggtccgccgggcgcgggaaaaggtacccaatcgaaacgcattcaggaaaagactggcatcccgcatattagcacgggcgatatcttccgtgacatcgtcaaaaagcaaaacgatgaactggcctcgaaaattaaagaaatcatggagaaaggtgaactcgttccagatgaactgggtaatgcggtagtaaaacgccgcctgtcggagaaagactgcgaaaaaggctttattttggatggttatccgcgtaccgtggctcaagcggaattcctggatagttttcttgaatcccagaatcgccagttgacagccgccgtgctgttcaaagtccccgaagatgaagttgtgcaacgtttaacctctcgcctgatctgtccgaaatgcgggcgtatctacaacatgatttttctgccaccaaaagaagacgagctgtgtgacgattgcggtgtcggcttagtacagcgtgatgatgataaggaagaaacggttcgtcaccgcctgaaagtctaccttgagaagacccagccggtcattgactattatagtaagaaaggtattctcaaacgcgtagatgggtcgcaaggaatcgacaacgttgttgcagaagtcctggggattctgggttggagcgataag

SEQ ID NO: 660 - protein, 231 aa, synthetic construct
  REGION 1..231: note = Variant of adenylate kinase
MHHHHHHGGSGMMAYLVFLGPPGAGKGTQSKRIQEKTGIPHISTGDIFRDIVKKQNDELASKIKEIMEKGELVPDELGNAVVKRRLSEKDCEKGFILDGYPRTVAQAEFLDSFLESQNRQLTAAVLFKVPEDEVVQRLTSRLICPKCGRIYNMIFLPPKEDELCDDCGVGLVQRDDDKEETVRHRLKVYLEKTQPVIDYYSKKGILKRVDGSQGIDNVVAEVLGILGWSDK

SEQ ID NO: 661 - DNA, 693 bp, synthetic construct
  misc_feature 1..693: note = Variant of adenylate kinase
  source 1..693: mol_type = other DNA
atgcaccatcatcaccatcacgggggctccggcatgatggcatatctggtgttcttaggtcctccgggcgcgggaaaaggtacccaatcgaaacgcatttcggaaaagactggcatcccgcatattagcacgggcgatatcttccgtgacatcgtcaagaagcaaaacgatgaactggcctcgaaaattaaagaaatcatggagaaaggtgaactcgttccagatgaactgggtaatgcggtagtaaaacgccgcctgtcggagaaagactgcgaaaaaggctttattttggatggttatccgcgtaccgtggctcaagcggaattcctggatcgctttcttgaatcccagaacaaacagttgacagccgccgtgctgttcaaagtccccgaagatgaagttgtgcaacgtttaacctctcgcctgatctgtccgaaatgcgggcgtatctacaacatgatttttctgccaccaaaagaagacgagctgtgtgacgattgcaaagtcggcttagtacagcgtgatgatgataaggaagaaacggttcgtcaccgcctgaaagtctaccttgagaagacccagccggtcattgactattatagtaagaaaggtattctcaaacgcgtagatgggtcgcaaggaatcgacaacgttgttgcagaagtcctggggattctgggttggagcgataag

SEQ ID NO: 662 - protein, 231 aa, synthetic construct
  REGION 1..231: note = Variant of adenylate kinase
MHHHHHHGGSGMMAYLVFLGPPGAGKGTQSKRISEKTGIPHISTGDIFRDIVKKQNDELASKIKEIMEKGELVPDELGNAVVKRRLSEKDCEKGFILDGYPRTVAQAEFLDRFLESQNKQLTAAVLFKVPEDEVVQRLTSRLICPKCGRIYNMIFLPPKEDELCDDCKVGLVQRDDDKEETVRHRLKVYLEKTQPVIDYYSKKGILKRVDGSQGIDNVVAEVLGILGWSDK

SEQ ID NO: 663 - DNA, 693 bp, synthetic construct
  misc_feature 1..693: note = Variant of adenylate kinase
  source 1..693: mol_type = other DNA
atgcaccatcatcaccatcacgggggctccggcatgatggcatatctggtgttcttaggtccgccgggcgcgggaaaaggtacccaatcgaaacgcattcaggaatacactggcatgccgcatattagcacgggcgatatcttccgtgacatcgtcaagaagcaaaacgatgaactggcctcgaaaattaaagaaatcatggagaaaggtgaactcgttccagatgaactgggtaatgcggtagtaaaacgccgcctgtcggagaaagactgcgaaaaaggctttattttggatggttatccgcgtaccgtggctcaagcggaattcctggatagttttcttgaatcccagaacaaacaattgacagccgccgtgctgttcaaagtccccgaagatgaagttgtgcaacgtttaacctctcgcctgatctgtccgaaatgcgggcgtatctacaacatgatttttctgccaccaaaagaagacgagctgtgtgacgattgcaaagtcggcttagtacagcgtgatgatgataaggaagaaacggttcgtcaccgcctgaaagtctacctggagaagacccagccggtcattgactattatagtaagaaaggtattctcaaacgcgtagatgggtcgcaaggaatcgacaacgttgttgcagaagtcctggggattctgggttggagcgataag

SEQ ID NO: 664 - protein, 231 aa, synthetic construct
  REGION 1..231: note = Variant of adenylate kinase
MHHHHHHGGSGMMAYLVFLGPPGAGKGTQSKRIQEYTGMPHISTGDIFRDIVKKQNDELASKIKEIMEKGELVPDELGNAVVKRRLSEKDCEKGFILDGYPRTVAQAEFLDSFLESQNKQLTAAVLFKVPEDEVVQRLTSRLICPKCGRIYNMIFLPPKEDELCDDCKVGLVQRDDDKEETVRHRLKVYLEKTQPVIDYYSKKGILKRVDGSQGIDNVVAEVLGILGWSDK

SEQ ID NO: 665 - DNA, 693 bp, synthetic construct
  misc_feature 1..693: note = Variant of adenylate kinase
  source 1..693: mol_type = other DNA
atgcaccatcatcaccatcacgggggctccggcatgatggcatatctggtgttcttaggtccgccgggcgcgggaaaaggtacccaatcgaaacgcattcaggaaaagactggcatcccgcatattagcacgggcgatatcttccgtgacatcgtcaagaagcaaaacgatgaactggcctcgaaaattaaagaaatcatggagaaaggtgaactcgttccagatgaactgggtaatgcggtagtaaaacgccgcctgtcggagaaagactgcgaaaaaggctttattttggatggttatccgcgtaccgtggctcaagcggaattcctggatagttttcttgaatcccagaacaaacagttgacagccgccgtgctgttcaaagtccccgaagatgaagttgtgcaacgtttaacctctcgcctgatctgtccgaaatgcgggcgtatctacaacatgatttttctgccaccaaaagaagacgagctgtgtgacgattgcaaagtcggcttagtaaaacgtgatgatgataaggaagaaacggttcgtcaccgcctgaaagtctacctggagaagacccagccggtcattgactattatagtaagaaaggtattctcaaacgcgtagatgggtcgcaaggaatcgacaacgttgttgcagaagtcctggggattctgggttggagcgataag

SEQ ID NO: 666 - protein, 231 aa, synthetic construct
  REGION 1..231: note = Variant of adenylate kinase
MHHHHHHGGSGMMAYLVFLGPPGAGKGTQSKRIQEKTGIPHISTGDIFRDIVKKQNDELASKIKEIMEKGELVPDELGNAVVKRRLSEKDCEKGFILDGYPRTVAQAEFLDSFLESQNKQLTAAVLFKVPEDEVVQRLTSRLICPKCGRIYNMIFLPPKEDELCDDCKVGLVKRDDDKEETVRHRLKVYLEKTQPVIDYYSKKGILKRVDGSQGIDNVVAEVLGILGWSDK

SEQ ID NO: 667 - DNA, 693 bp, synthetic construct
  misc_feature 1..693: note = Variant of adenylate kinase
  source 1..693: mol_type = other DNA
atgcaccatcatcaccatcacgggggctccggcatgggggcatatctggtgttcttaggtccgccgggcgcgggaaaaggtacccaaggccgtcgcattcaggaaaagactggcatcccgcatattagcacgggcgatatcttccgtgacatcgtcgctaagcaaaacgatgaactggcctcgaaaattaaagaaatcatggagaaaggtgaactcgttccagatgaactgggtaatgcggtagtaaaacgccgcctgtcggagaaagactgcgaaaaaggctttattttggatggttatccgcgtaccgtggctcaagcggaatatctggatagttttcttgagtcccagaatcgccagttgacagccgccgtgctgttcaaagtccccgaagatgaagttgtgcaacgtttaacctctcgcctgatctgtccgaaatgcgggcgtatctacaacatgatttttctgccaccaaaagaagacgagctgtgtgacgattgcggtgtcggcttagtacagcgtgatgatgataaggaagaaacggtccgtcaccgcctgaaagtctacgctgagaagacccagccggtcattgactattatagtaagaaaggtattctcaaacgcgtagatgggtcgcaaggaatcgacaacgttgttgcagaagtcctggggattctgggttggagcgataag

SEQ ID NO: 668 - protein, 231 aa, synthetic construct
  REGION 1..231: note = Variant of adenylate kinase
MHHHHHHGGSGMGAYLVFLGPPGAGKGTQGRRIQEKTGIPHISTGDIFRDIVAKQNDELASKIKEIMEKGELVPDELGNAVVKRRLSEKDCEKGFILDGYPRTVAQAEYLDSFLESQNRQLTAAVLFKVPEDEVVQRLTSRLICPKCGRIYNMIFLPPKEDELCDDCGVGLVQRDDDKEETVRHRLKVYAEKTQPVIDYYSKKGILKRVDGSQGIDNVVAEVLGILGWSDK

SEQ ID NO: 669 - DNA, 693 bp, synthetic construct
  misc_feature 1..693: note = Variant of adenylate kinase
  source 1..693: mol_type = other DNA
atgcaccatcatcaccatcacgggggctccggcatgggggcatatctggtgttcttaggtccgccgggcgcgggaaaaggtacccaaggccgtcgcattcaggaaaagactggcatcccgcatattagcacgggcgatatcttccgtgacatcgtcgctaagcaaaacgatgaactggcctcgaaaattaaagaaatcatggagaaaggtgaactcgttccagatgaactgggtaatgcggtagtaaaacgccgcctgtcggagaaagactgcgaaaaaggctttattttggatggttatccgcgtaccgtggctcaagcggaatatctggatagttttcttaagtcccagaatcgccagttgacagccgccgtggaattcaaagtccccgaagatgaagttgtgcaacgtttaacctctcgcctgatctgtccgaaatgcgggcgtatctacaacatgatttttctgccaccaaaagaagacgagctgtgtgacgattgcggtgtcggcttagtacagcgtgatgatgataaggaagaaacggtccgtcaccgcctgaaagtctacgctgagaagacccagccggtcattgactattatagtaagaaaggtattctcaaacgcgtagatgggtcgcaaggaatcgacaacgttgttgcagaagtcctggggattctgggttggagcgataag

SEQ ID NO: 670 - protein, 231 aa, synthetic construct
  REGION 1..231: note = Variant of adenylate kinase
MHHHHHHGGSGMGAYLVFLGPPGAGKGTQGRRIQEKTGIPHISTGDIFRDIVAKQNDELASKIKEIMEKGELVPDELGNAVVKRRLSEKDCEKGFILDGYPRTVAQAEYLDSFLKSQNRQLTAAVEFKVPEDEVVQRLTSRLICPKCGRIYNMIFLPPKEDELCDDCGVGLVQRDDDKEETVRHRLKVYAEKTQPVIDYYSKKGILKRVDGSQGIDNVVAEVLGILGWSDK

SEQ ID NO: 671 - DNA, 693 bp, synthetic construct
  misc_feature 1..693: note = Variant of adenylate kinase
  source 1..693: mol_type = other DNA
atgcaccatcatcaccatcacgggggctccggcatgggggcatatctggtgttcttaggtccgccgggcgcgggaaaaggtacccaaggccgtcgcattcaggaaaagactggcatcccgcatattagcacgggcgatatcttccgtgacatcgtcgctaagcaaaacgatgaactggcctcgaaaattaaagaaatcatggagaaaggtgaactcgttccagatgaactgggtaatgcggtagtaaaacgccgcctgtcggagaaagactgcgaaaaaggctttattttggatggttatccgcgtaccgtggctcaagcggaatatctggatagttttcttgaatcccagaatcgccagttgacagccgccgtggaattcaaagtccccgaagatgaagttgtgcaacgtttaacctctcgcctgatctgtccgaaatgcgggcgtatctacaacatgatttttctgccaccaaaagaagacgagctgtgtgacgattgcggtgtcggcttagtacagcgtgatgatgataaggaagaaacggtccgtcaccgcctgaaagtctacgctgagaagacccagccggtcattgactattatagtaagaaaggtattctcaaacgcgtagatgggtcgcaaggaatcgacaacgttgttgcagaagtcctggggattctgggttggagcgataag

SEQ ID NO: 672 - protein, 231 aa, synthetic construct
  REGION 1..231: note = Variant of adenylate kinase
MHHHHHHGGSGMGAYLVFLGPPGAGKGTQGRRIQEKTGIPHISTGDIFRDIVAKQNDELASKIKEIMEKGELVPDELGNAVVKRRLSEKDCEKGFILDGYPRTVAQAEYLDSFLESQNRQLTAAVEFKVPEDEVVQRLTSRLICPKCGRIYNMIFLPPKEDELCDDCGVGLVQRDDDKEETVRHRLKVYAEKTQPVIDYYSKKGILKRVDGSQGIDNVVAEVLGILGWSDK

SEQ ID NO: 673 - DNA, 693 bp, synthetic construct
  misc_feature 1..693: note = Variant of adenylate kinase
  source 1..693: mol_type = other DNA
atgcaccatcatcaccatcacgggggctccggcatgggggcatatctggtgttcttaggtccgccgggcgcgggaaaaggtacccaaggccgtcgcatttcggcaaagactggcatcccgcatattagcacgggcgatatcttccgtgacatcgtcgctaagcaaaacgatgaactggcctcgaaaattaaagagatcatggagaaaggtgaactcgttccagatgaactgggtaatgcggtagtaaaacgccgcctgtcggagaaagactgcgaaaaaggctttattttggatggttatccgcgtaccgtgcgccaagcggaatatctggatagttttcttgaaagccagaatcgccagttgacagccgccgtgctgttcaaagtccccgaagatgaagttgtgcaacgtttaacctctcgcctgatctgtccgaaatgcgggcgtatctacaacatgatttttctgccaccaaaagaagacgagctgtgtgacgattgcggtgtcggcttagtacagcgtgatgatgataaggaagaaacggtccgtcaccgcctgaaagtctaccttgagaagacccagccggtcattgactattatagtaagaaaggtattctcaaacgcgtagatgggtcgcaaggaatcgacaacgttgttgcagaagtcctggggattctgggttggagcgataag

SEQ ID NO: 674 - protein, 231 aa, synthetic construct
  REGION 1..231: note = Variant of adenylate kinase
MHHHHHHGGSGMGAYLVFLGPPGAGKGTQGRRISAKTGIPHISTGDIFRDIVAKQNDELASKIKEIMEKGELVPDELGNAVVKRRLSEKDCEKGFILDGYPRTVRQAEYLDSFLESQNRQLTAAVLFKVPEDEVVQRLTSRLICPKCGRIYNMIFLPPKEDELCDDCGVGLVQRDDDKEETVRHRLKVYLEKTQPVIDYYSKKGILKRVDGSQGIDNVVAEVLGILGWSDK

SEQ ID NO: 675 - DNA, 693 bp, synthetic construct
  misc_feature 1..693: note = Variant of adenylate kinase
  source 1..693: mol_type = other DNA
atgcaccatcatcaccatcacgggggctccggcatgggggcatatctggtgttcttaggtccgccgggcgcgggaaaaggtacccaaggccgtcgcattcaggaaaagactggcatcccgcatattagcacgggcgatatcttccgtgacatcgtcgctaagcaaaacgatgaactggcctcgaaaattaaagaaatcatggagaaaggtgaactcgttccagatgaactgggtaatgcggtagtaaaacgccgcctgtcggagaaagactgcgaaaaaggctttattttggatggttatccgcgtaccgtggctcaagcggaatatctggatagttttcttgaatcccagaatcgccagttgacagccgccgtggaattcaaagtccccgaagatgaagttgtgcaacgtttaacctctcgcctgatctgtccgaaatgcgggcgtatctacaacatgatttttctgccaccaaaagaagacgagctgtgtgacgattgcggtgtcggcttagtacagcgtgatgatgataaggaagaaacggtccgtcaccgcctgaaagtctacctggagaagacccagccggtcattgactattatagtaagaaaggtattctcaaacgcgtagatgggtcgcaaggaatcgacaacgttgttgcagaagtcctggggattctgggttggagcgataag

SEQ ID NO: 676 - protein, 231 aa, synthetic construct
  REGION 1..231: note = Variant of adenylate kinase
MHHHHHHGGSGMGAYLVFLGPPGAGKGTQGRRIQEKTGIPHISTGDIFRDIVAKQNDELASKIKEIMEKGELVPDELGNAVVKRRLSEKDCEKGFILDGYPRTVAQAEYLDSFLESQNRQLTAAVEFKVPEDEVVQRLTSRLICPKCGRIYNMIFLPPKEDELCDDCGVGLVQRDDDKEETVRHRLKVYLEKTQPVIDYYSKKGILKRVDGSQGIDNVVAEVLGILGWSDK

SEQ ID NO: 677 - DNA, 693 bp, synthetic construct
  misc_feature 1..693: note = Variant of adenylate kinase
  source 1..693: mol_type = other DNA
atgcaccatcatcaccatcacgggggctccggcatgggggcatatctggtgttcttaggtccgccgggcgcgggaaaaggtacccaaggccgtcgcattcaggaaaagactggcatcccgcatattagcacgggcgatatcttccgtgacatcgtcgctaagcaaaacgatgaagaggcctcgaaaattaaagaaatcatggagaaaggtgaactcgttccagatgaactgggtaatgcggtagtaaaacgccgcctgtcggagaaagactgcgaaaaaggctttattttggatggttatccgcgtaccgtggctcaagcggaatatctggatagttttcttgaatcccagaatcgccagttgacagccgccgtggaattcaaagtccccgaagatgaagttgtgcaacgtttaacctctcgcctgatctgtccgaaatgcgggcgtatctacaacatgatttttctgccaccaaaagaagacgagctgtgtgacgattgcggtgtcggcttagtacagcgtgatgatgataaggaagaaacggtccgtcaccgcctgaaagtctaccttgagaagacccagccggtcattgactattatagtaagaaaggtattctcaaacgcgtagatgggtcgcaaggaatcgacaacgttgttgcagaagtcctggggattctgggttggagcgataag

SEQ ID NO: 678 - protein, 231 aa, synthetic construct
  REGION 1..231: note = Variant of adenylate kinase
MHHHHHHGGSGMGAYLVFLGPPGAGKGTQGRRIQEKTGIPHISTGDIFRDIVAKQNDEEASKIKEIMEKGELVPDELGNAVVKRRLSEKDCEKGFILDGYPRTVAQAEYLDSFLESQNRQLTAAVEFKVPEDEVVQRLTSRLICPKCGRIYNMIFLPPKEDELCDDCGVGLVQRDDDKEETVRHRLKVYLEKTQPVIDYYSKKGILKRVDGSQGIDNVVAEVLGILGWSDK

SEQ ID NO: 679 - DNA, 693 bp, synthetic construct
  misc_feature 1..693: note = Variant of adenylate kinase
  source 1..693: mol_type = other DNA
atgcaccatcatcaccatcacgggggctccggcatgggggcatatctggtgttcttaggtccgccgggcgcgggaaaaggtacccaaggccgtcgcatttcggaaaagactggcatcccgcatattagcacgggcgatatcttccgtgacatcgtcgctaagcaaaacgatgaactggcctcgaaaattaaagaaatcatggagaaaggtgaactcgttccagatgaactgggtaatgcggtagtaaaacgccgcctgtcggagaaagactgcgaaaaaggctttattttggatggttatccgcgtaccgtgcgccaagcggaatatctggatagttttcttgaagagcagaatcgccagttgacagccgccgtgctgttcaaagtccccgaagatgaagttgtgcaacgtttaacctctcgcctgatctgtccggattgcgggcgtatctacaacatgatttttctgccaccaaaagaagacgagctgtgtgacgattgcggtgtcggcttagtacagcgtgatgatgataaggaagaaacggtccgtcaccgcctgaaagtctaccttgagaagacccagccggtcattgactattatagtaagaaaggtattctcaaacgcgtagatgggtcgcaaggaatcgacaacgttgttgcagaagtcctggggattctgggttggagcgataag

SEQ ID NO: 680 - protein, 231 aa, synthetic construct
  REGION 1..231: note = Variant of adenylate kinase
MHHHHHHGGSGMGAYLVFLGPPGAGKGTQGRRISEKTGIPHISTGDIFRDIVAKQNDELASKIKEIMEKGELVPDELGNAVVKRRLSEKDCEKGFILDGYPRTVRQAEYLDSFLEEQNRQLTAAVLFKVPEDEVVQRLTSRLICPDCGRIYNMIFLPPKEDELCDDCGVGLVQRDDDKEETVRHRLKVYLEKTQPVIDYYSKKGILKRVDGSQGIDNVVAEVLGILGWSDK

SEQ ID NO: 681 - DNA, 693 bp, synthetic construct
  misc_feature 1..693: note = Variant of adenylate kinase
  source 1..693: mol_type = other DNA
atgcaccatcatcaccatcacgggggctccggcatgggggcatatctggtgttcttaggtccgccgggcgcgggaaaaggtacccaaggccgtcgcattcaggaaaagactggcatcccgcatattagcacgggcgatatcctgcgtgacatcgtcgctaagcaaaacgatgaactggcctcgaaaattaaagaaatcatggagaaaggtgaactcgttccagatgaactgggtaatgcggtagtaaaacgccgcctgtcggagaaagactgcgaaaaaggctttattttggatggttatccgcgtaccgtggctcaagcggaatatctggatagttttcttgaatcccagaatcgccagttgacagccgccgtgctgttcaaagtccccgaagatgaagttgtgcaacgtttaacctctcgcctgatctgtccgaaatgcgggcgtatctacaacatgatttttctgccaccaaaagaagacgagctgtgtgacgattgcggtgtcggcttagtacagcgtgatgatgataaggaagaaacggtccgtcaccgcctgaaagtctaccttgagaagacccagccggtcattgactattatagtaagaaaggtattctcaaacgcgtagatgggtcgcaaggaatcgacaacgttgttgcagaagtcctggggattctgggttggagcgataag

SEQ ID NO: 682 - protein, 231 aa, synthetic construct
  REGION 1..231: note = Variant of adenylate kinase
MHHHHHHGGSGMGAYLVFLGPPGAGKGTQGRRIQEKTGIPHISTGDILRDIVAKQNDELASKIKEIMEKGELVPDELGNAVVKRRLSEKDCEKGFILDGYPRTVAQAEYLDSFLESQNRQLTAAVLFKVPEDEVVQRLTSRLICPKCGRIYNMIFLPPKEDELCDDCGVGLVQRDDDKEETVRHRLKVYLEKTQPVIDYYSKKGILKRVDGSQGIDNVVAEVLGILGWSDK

SEQ ID NO: 683 - DNA, 693 bp, synthetic construct
  misc_feature 1..693: note = Variant of adenylate kinase
  source 1..693: mol_type = other DNA
atgcaccatcatcaccatcacgggggctccggcatgggggcatatctggtgttcttaggtccgccgggcgcgggaaaaggtacccaaggccgtcgcattcaggaaaagactggcatcccgcatattagcacgggcgatatcttccgtgacatcgtcgctaagcaaaacgatgaactggcctcgaaaattaaagaatttatggagaaaggtgaactcgttccagatgaactgggtaatgcggtagtaaaacgccgcctgtcggagaaagactgcgaaaaaggctttattttggatggttatccgcgtaccgtggctcaagcggaatatctggatagttttcttgaatcccagaatcgccagttgacagccgccgtgctgttcaaagtccccgaagatgaagttgtgcaacgtttaacctctcgcctgatctgtccgaaatgcgggcgtatctacaacatgatttttctgccaccaaaagaagacgagctgtgtgacgattgcggtgtcggcttagtacagcgtgatgatgataaggaagaaacggtccgtcaccgcctgaaagtctaccttgagaagacccagccggtcattgactattatagtaagaaaggtattctcaaacgcgtagatgggtcgcaaggaatcgacaacgttgttgcagaagtcctggggattctgggttggagcgataag

SEQ ID NO: 684 - protein, 231 aa, synthetic construct
  REGION 1..231: note = Variant of adenylate kinase
MHHHHHHGGSGMGAYLVFLGPPGAGKGTQGRRIQEKTGIPHISTGDIFRDIVAKQNDELASKIKEFMEKGELVPDELGNAVVKRRLSEKDCEKGFILDGYPRTVAQAEYLDSFLESQNRQLTAAVLFKVPEDEVVQRLTSRLICPKCGRIYNMIFLPPKEDELCDDCGVGLVQRDDDKEETVRHRLKVYLEKTQPVIDYYSKKGILKRVDGSQGIDNVVAEVLGILGWSDK

SEQ ID NO: 685 - DNA, 693 bp, synthetic construct
  misc_feature 1..693: note = Variant of adenylate kinase
  source 1..693: mol_type = other DNA
atgcaccatcatcaccatcacgggggctccggcatgggggcatatctggtgttcttaggtccgccgggcgcgggaaaaggtacccaaggccgtcgcattcaggaaaagactggcatcccgcatattagcacgggcgatatcttccgtgacatcgtcgctaagcaaaacgatgaaacggcctcgaaaattaaagaaatcatggagaaaggtgaactcgttccagatgaactgggtaatgcggtagtaaaacgccgcctgtcggagaaagactgcgaaaaaggctttattttggatggttatccgcgtaccgtggctcaagcggaatatctggatagttttcttgaatcccagaatcgccagttgacagccgccgtgctgttcaaagtccccgaagatgaagttgtgcaacgtttaacctctcgcctgatctgtccgaaatgcgggcgtatctacaacatgatttttctgccaccaaaagaagacgagctgtgtgacgattgcggtgtcggcttagtacagcgtgatgatgataaggaagaaacggtccgtcaccgcctgaaagtctaccttgagaagacccagccggtcattgactattatagtaagaaaggtattctcaaacgcgtagatgggtcgcaaggaatcgacaacgttgttgcagaagtcctggggattctgggttggagcgataag

SEQ ID NO: 686 - protein, 231 aa, synthetic construct
  REGION 1..231: note = Variant of adenylate kinase
MHHHHHHGGSGMGAYLVFLGPPGAGKGTQGRRIQEKTGIPHISTGDIFRDIVAKQNDETASKIKEIMEKGELVPDELGNAVVKRRLSEKDCEKGFILDGYPRTVAQAEYLDSFLESQNRQLTAAVLFKVPEDEVVQRLTSRLICPKCGRIYNMIFLPPKEDELCDDCGVGLVQRDDDKEETVRHRLKVYLEKTQPVIDYYSKKGILKRVDGSQGIDNVVAEVLGILGWSDK

SEQ ID NO: 687 - DNA, 693 bp, synthetic construct
  misc_feature 1..693: note = Variant of adenylate kinase
  source 1..693: mol_type = other DNA
atgcaccatcatcaccatcacgggggctccggcatgggggcatatctggtgttcttaggtccgccgggcgcgggaaaaggtacccaaggccgtcgcattcaggaaaagactggcatcccgcatattagcacgggcgatatcttccgtgacatcgtcgctaagcaaaacgatgaactggcctcgaaaattaaagaaatcatggagaaaggtgaactcgttccagatgaactgggtaatgcggtagtaaaacgccgcctgtcggagaaagactgcgaaaaaggctttattttggatggttatccgcgtaccgtggctcaagcggaatatctggatagttttcttgaatcccagaatcgccagttgacagccgccgtgctgttcaaagtccccgaagatgaagttgtgcaacgtttaacctctcgcctgatctgtccgaaatgccatcgtatctacaacatgatttttctgccaccaaaagaagacgagctgtgtgacgattgcggtgtcggcttagtacagcgtgatgatgataaggaagaaacggtccgtcaccgcctgaaagtctaccttgagaagacccagccggtcattgactattatagtaagaaaggtattctcaaacgcgtagatgggtcgcaaggaatcgacaacgttgttgcagaagtcctggggattctgggttggagcgataag

SEQ ID NO: 688 - protein, 231 aa, synthetic construct
  REGION 1..231: note = Variant of adenylate kinase
MHHHHHHGGSGMGAYLVFLGPPGAGKGTQGRRIQEKTGIPHISTGDIFRDIVAKQNDELASKIKEIMEKGELVPDELGNAVVKRRLSEKDCEKGFILDGYPRTVAQAEYLDSFLESQNRQLTAAVLFKVPEDEVVQRLTSRLICPKCHRIYNMIFLPPKEDELCDDCGVGLVQRDDDKEETVRHRLKVYLEKTQPVIDYYSKKGILKRVDGSQGIDNVVAEVLGILGWSDK

SEQ ID NO: 689 - DNA, 693 bp, synthetic construct
  misc_feature 1..693: note = Variant of adenylate kinase
  source 1..693: mol_type = other DNA
atgcaccatcatcaccatcacgggggctccggcatgggggcatatctggtgttcttaggtccgccgggcgcgggaaaaggtacccaaggccgtcgcattcaggaaaagactggcatcccgcatattagcacgggcgatatcttccgtgacatcgtcgctaagcaaaacgatgaactggcctcgaaaattaaagaaatcatggagaaaggtgaactcgttccagatgaactgggtaatgcggtaacgaaacgccgcctgtcggagaaagactgcgaaaaaggctttattttggatggttatccgcgtaccgtggctcaagcggaatatctggatagttttcttgaatcccagaatcgccagttgacagccgccgtgctgttcaaagtccccgaagatgaagttgtgcaacgtttaacctctcgcctgatctgtccgaaatgcgggcgtatctacaacatgatttttctgccaccaaaagaagacgagctgtgtgacgattgcggtgtcggcttagtacagcgtgatgatgataaggaagaaacggtccgtcaccgcctgaaagtctaccttgagaagacccagccggtcattgactattatagtaagaaaggtattctcaaacgcgtagatgggtcgcaaggaatcgacaacgttgttgcagaagtcctggggattctgggttggagcgataag

SEQ ID NO: 690 - protein, 231 aa, synthetic construct
  REGION 1..231: note = Variant of adenylate kinase
MHHHHHHGGSGMGAYLVFLGPPGAGKGTQGRRIQEKTGIPHISTGDIFRDIVAKQNDELASKIKEIMEKGELVPDELGNAVTKRRLSEKDCEKGFILDGYPRTVAQAEYLDSFLESQNRQLTAAVLFKVPEDEVVQRLTSRLICPKCGRIYNMIFLPPKEDELCDDCGVGLVQRDDDKEETVRHRLKVYLEKTQPVIDYYSKKGILKRVDGSQGIDNVVAEVLGILGWSDK

SEQ ID NO: 691 - DNA, 693 bp, synthetic construct
  misc_feature 1..693: note = Variant of adenylate kinase
  source 1..693: mol_type = other DNA
atgcaccatcatcaccatcacgggggctccggcatgggggcatatctggtgttcttaggtccgccgggcgcgggaaaaggtacccaaggccgtcgcattcaggaaaagactggcatcccgcatattagcacgggcgatatcttccgtgacatcgtcgctaagcaaaacgatgaagtggcctcgaaaattaaagaaatcatggagaaaggtgaactcgttccagatgaactgggtaatgcggtagtaaaacgccgcctgtcggagaaagactgcgaaaaaggctttattttggatggttatccgcgtaccgtggctcaagcggaatatctggatagttttcttgaatcccagaatcgccagttgacagccgccgtgctgttcaaagtccccgaagatgaagttgtgcaacgtttaacctctcgcctgatctgtccgaaatgcgggcgtatctacaacatgatttttctgccaccaaaagaagacgagctgtgtgacgattgcggtgtcggcttagtacagcgtgatgatgataaggaagaaacggtccgtcaccgcctgaaagtctaccttgagaagacccagccggtcattgactattatagtaagaaaggtattctcaaacgcgtagatgggtcgcaaggaatcgacaacgttgttgcagaagtcctggggattctgggttggagcgataag

SEQ ID NO: 692 - protein, 231 aa, synthetic construct
  REGION 1..231: note = Variant of adenylate kinase
MHHHHHHGGSGMGAYLVFLGPPGAGKGTQGRRIQEKTGIPHISTGDIFRDIVAKQNDEVASKIKEIMEKGELVPDELGNAVVKRRLSEKDCEKGFILDGYPRTVAQAEYLDSFLESQNRQLTAAVLFKVPEDEVVQRLTSRLICPKCGRIYNMIFLPPKEDELCDDCGVGLVQRDDDKEETVRHRLKVYLEKTQPVIDYYSKKGILKRVDGSQGIDNVVAEVLGILGWSDK

SEQ ID NO: 693 - DNA, 693 bp, synthetic construct
  misc_feature 1..693: note = Variant of adenylate kinase
  source 1..693: mol_type = other DNA
atgcaccatcatcaccatcacgggggctccggcatgggggcatatctggtgttcttaggtccgccgggcgcgggaaaaggtacccaaggccgtcgcattcaggaaaagactggcatcccgcatattagcacgggcgatatcttccgtgacatcgtcgctaagcaaaacgatgaatatgcctcgaaaattaaagaaatcatggagaaaggtgaactcgttccagatgaactgggtaatgcggtagtaaaacgccgcctgtcggagaaagactgcgaaaaaggctttattttggatggttatccgcgtaccgtggctcaagcggaatatctggatagttttcttgaatcccagaatcgccagttgacagccgccgtgctgttcaaagtccccgaagatgaagttgtgcaacgtttaacctctcgcctgatctgtccgaaatgcgggcgtatctacaacatgatttttctgccaccaaaagaagacgagctgtgtgacgattgcggtgtcggcttagtacagcgtgatgatgataaggaagaaacggtccgtcaccgcctgaaagtctaccttgagaagacccagccggtcattgactattatagtaagaaaggtattctcaaacgcgtagatgggtcgcaaggaatcgacaacgttgttgcagaagtcctggggattctgggttggagcgataag

SEQ ID NO: 694 - protein, 231 aa, synthetic construct
  REGION 1..231: note = Variant of adenylate kinase
MHHHHHHGGSGMGAYLVFLGPPGAGKGTQGRRIQEKTGIPHISTGDIFRDIVAKQNDEYASKIKEIMEKGELVPDELGNAVVKRRLSEKDCEKGFILDGYPRTVAQAEYLDSFLESQNRQLTAAVLFKVPEDEVVQRLTSRLICPKCGRIYNMIFLPPKEDELCDDCGVGLVQRDDDKEETVRHRLKVYLEKTQPVIDYYSKKGILKRVDGSQGIDNVVAEVLGILGWSDK

SEQ ID NO: 695 - DNA, 693 bp, synthetic construct
  misc_feature 1..693: note = Variant of adenylate kinase
  source 1..693: mol_type = other DNA
atgcaccatcatcaccatcacgggggctccggcatgggggcatatctggtgttcttaggtccgccgggcgcgggaaaaggtacccaaggccgtcgcattcaggaaaagactggcatcccgcatattagcacgggcgatatcttccgtgacatcgtcgctaagcaaaacgatgaaccggcctcgaaaattaaagaaatcatggagaaaggtgaactcgttccagatgaactgggtaatgcggtagtaaaacgccgcctgtcggagaaagactgcgaaaaaggctttattttggatggttatccgcgtaccgtggctcaagcggaatatctggatagttttcttgaatcccagaatcgccagttgacagccgccgtgctgttcaaagtccccgaagatgaagttgtgcaacgtttaacctctcgcctgatctgtccgaaatgcgggcgtatctacaacatgatttttctgccaccaaaagaagacgagctgtgtgacgattgcggtgtcggcttagtacagcgtgatgatgataaggaagaaacggtccgtcaccgcctgaaagtctaccttgagaagacccagccggtcattgactattatagtaagaaaggtattctcaaacgcgtagatgggtcgcaaggaatcgacaacgttgttgcagaagtcctggggattctgggttggagcgataag

SEQ ID NO: 696 - protein, 231 aa, synthetic construct
  REGION 1..231: note = Variant of adenylate kinase
MHHHHHHGGSGMGAYLVFLGPPGAGKGTQGRRIQEKTGIPHISTGDIFRDIVAKQNDEPASKIKEIMEKGELVPDELGNAVVKRRLSEKDCEKGFILDGYPRTVAQAEYLDSFLESQNRQLTAAVLFKVPEDEVVQRLTSRLICPKCGRIYNMIFLPPKEDELCDDCGVGLVQRDDDKEETVRHRLKVYLEKTQPVIDYYSKKGILKRVDGSQGIDNVVAEVLGILGWSDK

SEQ ID NO: 697 - DNA, 693 bp, synthetic construct
  misc_feature 1..693: note = Variant of adenylate kinase
  source 1..693: mol_type = other DNA
atgcaccatcatcaccatcacgggggctccggcatgggggcatatctggtgttcttaggtccgccgggcgcgggaaaaggtacccaaggccgtcgcattcaggaaaagactggcatcccgcatattagcacgggcgatatcttccgtgacatcgtcgctaagcaaaacgatgaactggcctcgaaaattaaagaaatcatggagaaaggtgaactcgttccagatgaactgggtaatgcggtagtaaaacgccgcctgtcggagaaagactgcgaaaaaggctttattttggatggttttccgcgtaccgtggctcaagcggaatatctggatagttttcttgaatcccagaatcgccagttgacagccgccgtgctgttcaaagtccccgaagatgaagttgtgcaacgtttaacctctcgcctgatctgtccgaaatgcgggcgtatctacaacatgatttttctgccaccaaaagaagacgagctgtgtgacgattgcggtgtcggcttagtacagcgtgatgatgataaggaagaaacggtccgtcaccgcctgaaagtctaccttgagaagacccagccggtcattgactattatagtaagaaaggtattctcaaacgcgtagatgggtcgcaaggaatcgacaacgttgttgcagaagtcctggggattctgggttggagcgataag

SEQ ID NO: 698 - protein, 231 aa, synthetic construct
  REGION 1..231: note = Variant of adenylate kinase
MHHHHHHGGSGMGAYLVFLGPPGAGKGTQGRRIQEKTGIPHISTGDIFRDIVAKQNDELASKIKEIMEKGELVPDELGNAVVKRRLSEKDCEKGFILDGFPRTVAQAEYLDSFLESQNRQLTAAVLFKVPEDEVVQRLTSRLICPKCGRIYNMIFLPPKEDELCDDCGVGLVQRDDDKEETVRHRLKVYLEKTQPVIDYYSKKGILKRVDGSQGIDNVVAEVLGILGWSDK

SEQ ID NO: 699 - DNA, 693 bp, synthetic construct
  misc_feature 1..693: note = Variant of adenylate kinase
  source 1..693: mol_type = other DNA
atgcaccatcatcaccatcacgggggctccggcatgggggcatatctggtgttcttaggtccgccgggcgcgggaaaaggtacccaaggccgtcgcattcaggaaaagactggcatcccgcatattagcacgggcgatatcttccgtgacatcgtcgctaagcaaaacgatgaactggcctcgaaaattaaagaaatcatggagaaaggtgaactcgttccagatgaactgggtaatgcggtagtaaaacgccgcctgtcggagaaagactgcgaaaaaggctttattttggatggttatccgcgtaccgtggctcaagcggaatatctggatagttttcttgaatcccagaatcgccagttgacagccgccgtgctgttcaaagtccccgaagatgaagttgtgcaacgtttaacctctcgcctgatctgtccgaaatgctttcgtatctacaacatgatttttctgccaccaaaagaagacgagctgtgtgacgattgcggtgtcggcttagtacagcgtgatgatgataaggaagaaacggtccgtcaccgcctgaaagtctaccttgagaagacccagccggtcattgactattatagtaagaaaggtattctcaaacgcgtagatgggtcgcaaggaatcgacaacgttgttgcagaagtcctggggattctgggttggagcgataag

SEQ ID NO: 700 - protein, 231 aa, synthetic construct
  REGION 1..231: note = Variant of adenylate kinase
MHHHHHHGGSGMGAYLVFLGPPGAGKGTQGRRIQEKTGIPHISTGDIFRDIVAKQNDELASKIKEIMEKGELVPDELGNAVVKRRLSEKDCEKGFILDGYPRTVAQAEYLDSFLESQNRQLTAAVLFKVPEDEVVQRLTSRLICPKCFRIYNMIFLPPKEDELCDDCGVGLVQRDDDKEETVRHRLKVYLEKTQPVIDYYSKKGILKRVDGSQGIDNVVAEVLGILGWSDK

SEQ ID NO: 701 - DNA, 693 bp, synthetic construct
  misc_feature 1..693: note = Variant of adenylate kinase
  source 1..693: mol_type = other DNA
atgcaccatcatcaccatcacgggggctccggcatgggggcatatctggtgttcttaggtccgccgggcgcgggaaaatctacccaaggccgtcgcattcaggaaaagactggcatcccgcatattagcacgggcgatatcttccgtgacatcgtcgctaagcaaaacgatgaactggcctcgaaaattaaagaaatcatggagaaaggtgaactcgttccagatgaactgggtaatgcggtagtaaaacgccgcctgtcggagaaagactgcgaaaaaggctttattttggatggttatccgcgtaccgtggctcaagcggaatatctggatagttttcttgaatcccagaatcgccagttgacagccgccgtgctgttcaaagtccccgaagatgaagttgtgcaacgtttaacctctcgcctgatctgtccgaaatgcgggcgtatctacaacatgatttttctgccaccaaaagaagacgagctgtgtgacgattgcggtgtcggcttagtacagcgtgatgatgataaggaagaaacggtccgtcaccgcctgaaagtctaccttgagaagacccagccggtcattgactattatagtaagaaaggtattctcaaacgcgtagatgggtcgcaaggaatcgacaacgttgttgcagaagtcctggggattctgggttggagcgataag

SEQ ID NO: 702 - protein, 231 aa, synthetic construct
  REGION 1..231: note = Variant of adenylate kinase
MHHHHHHGGSGMGAYLVFLGPPGAGKSTQGRRIQEKTGIPHISTGDIFRDIVAKQNDELASKIKEIMEKGELVPDELGNAVVKRRLSEKDCEKGFILDGYPRTVAQAEYLDSFLESQNRQLTAAVLFKVPEDEVVQRLTSRLICPKCGRIYNMIFLPPKEDELCDDCGVGLVQRDDDKEETVRHRLKVYLEKTQPVIDYYSKKGILKRVDGSQGIDNVVAEVLGILGWSDK

SEQ ID NO: 703 - DNA, 693 bp, synthetic construct
  misc_feature 1..693: note = Variant of adenylate kinase
  source 1..693: mol_type = other DNA
atgcaccatcatcaccatcacgggggctccggcatgggggcatatctggtgttcttaggtccgccgggcgcgggaaaaggtacccaaggccgtcgcattcaggaaaagactggcatcccgcatattagcacgggcgatatcttccgtgacatcgtcgctaagcaaaacgatgaactggcctcgaaaattaaagaaatcatggagaaaggtgaactcgttccagatgaactgggtaatgcggtagtaaaacgccgcctgtcggagaaagactgcgaaaaaggctttattttggatggttatccgcgtaccgtggctcaagcggaatatctggatagttttcttgaatcccagaatcgccagttgacagccgccgtgctgttcaaagtccccgaagatgaagttaggcaacgtttaacctctcgcctgatctgtccgaaatgcgggcgtatctacaacatgatttttctgccaccaaaagaagacgagctgtgtgacgattgcggtgtcggcttagtacagcgtgatgatgataaggaagaaacggtccgtcaccgcctgaaagtctaccttgagaagacccagccggtcattgactattatagtaagaaaggtattctcaaacgcgtagatgggtcgcaaggaatcgacaacgttgttgcagaagtcctggggattctgggttggagcgataag

SEQ ID NO: 704 - protein, 231 aa, synthetic construct
  REGION 1..231: note = Variant of adenylate kinase
MHHHHHHGGSGMGAYLVFLGPPGAGKGTQGRRIQEKTGIPHISTGDIFRDIVAKQNDELASKIKEIMEKGELVPDELGNAVVKRRLSEKDCEKGFILDGYPRTVAQAEYLDSFLESQNRQLTAAVLFKVPEDEVRQRLTSRLICPKCGRIYNMIFLPPKEDELCDDCGVGLVQRDDDKEETVRHRLKVYLEKTQPVIDYYSKKGILKRVDGSQGIDNVVAEVLGILGWSDK

SEQ ID NO: 705 - DNA, 693 bp, synthetic construct
  misc_feature 1..693: note = Variant of adenylate kinase
  source 1..693: mol_type = other DNA
atgcaccatcatcaccatcacgggggctccggcatgggggcatatctggtgttcttaggtccgccgggcgcgggaaaaggtacccaaggccgtcgcattcaggaaaagactggcatcccgcatattagcacgggcgatatcttccgtgacatcgtcgctaagcaaaacgatgaactggcctcgaaaattaaagaaatcatggagaaaggtgaactcgttccagatgaactgggtaatgcggtagtaaaacgccgcctgtcggagaaagactgcgaaaaaggctttattttggatggttatccgcgtaccgtggctcaagcggaatatctggatagttttcttgaatcccagaatcgccagttgacagccgccgtgctgttcaaagtccccgaagatgaagttgtgcaacgtttaacctctcgcctgatctgtccgaaatgcactcgtatctacaacatgatttttctgccaccaaaagaagacgagctgtgtgacgattgcggtgtcggcttagtacagcgtgatgatgataaggaagaaacggtccgtcaccgcctgaaagtctaccttgagaagacccagccggtcattgactattatagtaagaaaggtattctcaaacgcgtagatgggtcgcaaggaatcgacaacgttgttgcagaagtcctggggattctgggttggagcgataag

SEQ ID NO: 706 - protein, 231 aa, synthetic construct
  REGION 1..231: note = Variant of adenylate kinase
MHHHHHHGGSGMGAYLVFLGPPGAGKGTQGRRIQEKTGIPHISTGDIFRDIVAKQNDELASKIKEIMEKGELVPDELGNAVVKRRLSEKDCEKGFILDGYPRTVAQAEYLDSFLESQNRQLTAAVLFKVPEDEVVQRLTSRLICPKCTRIYNMIFLPPKEDELCDDCGVGLVQRDDDKEETVRHRLKVYLEKTQPVIDYYSKKGILKRVDGSQGIDNVVAEVLGILGWSDK

SEQ ID NO: 707 - DNA, 693 bp, synthetic construct
  misc_feature 1..693: note = Variant of adenylate kinase
  source 1..693: mol_type = other DNA
atgcaccatcatcaccatcacgggggctccggcatgggggcatatctggtgttcttaggtccgccgggcgcgggaaaaggtacccaaggccgtcgcattcaggaaaagactggcatcccgcatattagcacgggcgatatcttccgtgacatcgtcgctaagcaaaacgatgaactggcctcgaaaattaaagaaatcatggagaaaggtgaactcgttccagatgaaatgggtaatgcggtagtaaaacgccgcctgtcggagaaagactgcgaaaaaggctttattttggatggttatccgcgtaccgtggctcaagcggaatatctggatagttttcttgaatcccagaatcgccagttgacagccgccgtgctgttcaaagtccccgaagatgaagttgtgcaacgtttaacctctcgcctgatctgtccgaaatgcgggcgtatctacaacatgatttttctgccaccaaaagaagacgagctgtgtgacgattgcggtgtcggcttagtacagcgtgatgatgataaggaagaaacggtccgtcaccgcctgaaagtctaccttgagaagacccagccggtcattgactattatagtaagaaaggtattctcaaacgcgtagatgggtcgcaaggaatcgacaacgttgttgcagaagtcctggggattctgggttggagcgataag

SEQ ID NO: 708 - protein, 231 aa, synthetic construct
  REGION 1..231: note = Variant of adenylate kinase
MHHHHHHGGSGMGAYLVFLGPPGAGKGTQGRRIQEKTGIPHISTGDIFRDIVAKQNDELASKIKEIMEKGELVPDEMGNAVVKRRLSEKDCEKGFILDGYPRTVAQAEYLDSFLESQNRQLTAAVLFKVPEDEVVQRLTSRLICPKCGRIYNMIFLPPKEDELCDDCGVGLVQRDDDKEETVRHRLKVYLEKTQPVIDYYSKKGILKRVDGSQGIDNVVAEVLGILGWSDK

SEQ ID NO: 709 - DNA, 693 bp, synthetic construct
  misc_feature 1..693: note = Variant of adenylate kinase
  source 1..693: mol_type = other DNA
atgcaccatcatcaccatcacgggggctccggcatgggggcatatctggtgttcttaggtccgccgggcgcgggaaaaggtacccaaggccgtcgcattcaggaaaagactggcatcccgcatattagcacgggcgatatcttccgtgacatcgtcgctaagcaaaacgatgaactggcctcgaaaattaaagaaatcatggagaaaggtgaactcgttccagatgaactgggtaatgcggtagtaaaacgccgcctgtcggagaaagactgcgaaaaaggctttattttggatggttatccgcgtaccgtggctcaagcggaatatctggatagttttcttgaatcccagaatcgccagttgacagccgccgtgctgttcaaagtccccgaagatgaagttgtgcaacgttgtacctctcgcctgatctgtccgaaatgcgggcgtatctacaacatgatttttctgccaccaaaagaagacgagctgtgtgacgattgcggtgtcggcttagtacagcgtgatgatgataaggaagaaacggtccgtcaccgcctgaaagtctaccttgagaagacccagccggtcattgactattatagtaagaaaggtattctcaaacgcgtagatgggtcgcaaggaatcgacaacgttgttgcagaagtcctggggattctgggttggagcgataag

SEQ ID NO: 710 - protein, 231 aa, synthetic construct
  REGION 1..231: note = Variant of adenylate kinase
MHHHHHHGGSGMGAYLVFLGPPGAGKGTQGRRIQEKTGIPHISTGDIFRDIVAKQNDELASKIKEIMEKGELVPDELGNAVVKRRLSEKDCEKGFILDGYPRTVAQAEYLDSFLESQNRQLTAAVLFKVPEDEVVQRCTSRLICPKCGRIYNMIFLPPKEDELCDDCGVGLVQRDDDKEETVRHRLKVYLEKTQPVIDYYSKKGILKRVDGSQGIDNVVAEVLGILGWSDK

SEQ ID NO: 711 - DNA, 693 bp, synthetic construct
  misc_feature 1..693: note = Variant of adenylate kinase
  source 1..693: mol_type = other DNA
atgcaccatcatcaccatcacgggggctccggcatgggggcatatctggtgttcttaggtccgccgggcgcgggaaaaggtacccaaggccgtcgcattcaggaaaagactggcatcccgcatattagcacgggcgatatcttccgtgacatcgtcgctaagcaaaacgatgaactggcctcgaaaattaaagaaatcatggagaaaggtgaactcgttccagatgaactgggtaatgcggtagtaaaacgccgcctgtcggagaaagactgcgaaaaaggctttattttggatggttatccgcgtaccgtggctcaagcggaatatctggatagttttcttgaatcccagaatcgccagttgacagccgccgtgctgttcaaagtccccgaagatgaagttgtgcaacgtttaacctctcgcctgatctgtccgaaatgccagcgtatctacaacatgatttttctgccaccaaaagaagacgagctgtgtgacgattgcggtgtcggcttagtacagcgtgatgatgataaggaagaaacggtccgtcaccgcctgaaagtctaccttgagaagacccagccggtcattgactattatagtaagaaaggtattctcaaacgcgtagatgggtcgcaaggaatcgacaacgttgttgcagaagtcctggggattctgggttggagcgataag

SEQ ID NO: 712 - protein, 231 aa, synthetic construct
  REGION 1..231: note = Variant of adenylate kinase
MHHHHHHGGSGMGAYLVFLGPPGAGKGTQGRRIQEKTGIPHISTGDIFRDIVAKQNDELASKIKEIMEKGELVPDELGNAVVKRRLSEKDCEKGFILDGYPRTVAQAEYLDSFLESQNRQLTAAVLFKVPEDEVVQRLTSRLICPKCQRIYNMIFLPPKEDELCDDCGVGLVQRDDDKEETVRHRLKVYLEKTQPVIDYYSKKGILKRVDGSQGIDNVVAEVLGILGWSDK

SEQ ID NO: 713 - DNA, 693 bp, synthetic construct
  misc_feature 1..693: note = Variant of adenylate kinase
  source 1..693: mol_type = other DNA
atgcaccatcatcaccatcacgggggctccggcatgggggcatatctggtgttcttaggtccgccgggcgcgggaaaaggtacccaaggccgtcgcattcaggaaaagactggcatcccgcatattagcacgggcgatatcttccgtgacatcgtcgctaagcaaaacgatgaactggcctcgaaaattaaagaaatcatggagaaaggtgaactcgttccagatgaactgggtaatgcggtagtaaaacgccgcctgtcggagaaagactgcgaaaaaggctttattttggatggttatccgcgtaccgtggctcaagcggaatatctggatagttttcttgaatcccagaatcgccagttgacagccgccgtggctttcaaagtccccgaagatgaagttgtgcaacgtttaacctctcgcctgatctgtccgaaatgcgggcgtatctacaacatgatttttctgccaccaaaagaagacgagctgtgtgacgattgcggtgtcggcttagtacagcgtgatgatgataaggaagaaacggtccgtcaccgcctgaaagtctaccttgagaagacccagccggtcattgactattatagtaagaaaggtattctcaaacgcgtagatgggtcgcaaggaatcgacaacgttgttgcagaagtcctggggattctgggttggagcgataag

SEQ ID NO: 714 - protein, 231 aa, synthetic construct
  REGION 1..231: note = Variant of adenylate kinase
MHHHHHHGGSGMGAYLVFLGPPGAGKGTQGRRIQEKTGIPHISTGDIFRDIVAKQNDELASKIKEIMEKGELVPDELGNAVVKRRLSEKDCEKGFILDGYPRTVAQAEYLDSFLESQNRQLTAAVAFKVPEDEVVQRLTSRLICPKCGRIYNMIFLPPKEDELCDDCGVGLVQRDDDKEETVRHRLKVYLEKTQPVIDYYSKKGILKRVDGSQGIDNVVAEVLGILGWSDK

SEQ ID NO: 715 - DNA, 693 bp, synthetic construct
  misc_feature 1..693: note = Variant of adenylate kinase
  source 1..693: mol_type = other DNA
atgcaccatcatcaccatcacgggggctccggcatgggggcatatctggtgttcttaggtccgccgggcgcgggaaaaggtacccaaggccgtcgcattcaggaaaagactggcatcccgcatattagcacgggcgatatcttccgtgacatcgcggctaagcaaaacgatgaactggcctcgaaaattaaagaaatcatggagaaaggtgaactcgttccagatgaactgggtaatgcggtagtaaaacgccgcctgtcggagaaagactgcgaaaaaggctttattttggatggttatccgcgtaccgtggctcaagcggaatatctggatagttttcttgaatcccagaatcgccagttgacagccgccgtgctgttcaaagtccccgaagatgaagttgtgcaacgtttaacctctcgcctgatctgtccgaaatgcgggcgtatctacaacatgatttttctgccaccaaaagaagacgagctgtgtgacgattgcggtgtcggcttagtacagcgtgatgatgataaggaagaaacggtccgtcaccgcctgaaagtctaccttgagaagacccagccggtcattgactattatagtaagaaaggtattctcaaacgcgtagatgggtcgcaaggaatcgacaacgttgttgcagaagtcctggggattctgggttggagcgataag

SEQ ID NO: 716 - protein, 231 aa, synthetic construct
  REGION 1..231: note = Variant of adenylate kinase
MHHHHHHGGSGMGAYLVFLGPPGAGKGTQGRRIQEKTGIPHISTGDIFRDIAAKQNDELASKIKEIMEKGELVPDELGNAVVKRRLSEKDCEKGFILDGYPRTVAQAEYLDSFLESQNRQLTAAVLFKVPEDEVVQRLTSRLICPKCGRIYNMIFLPPKEDELCDDCGVGLVQRDDDKEETVRHRLKVYLEKTQPVIDYYSKKGILKRVDGSQGIDNVVAEVLGILGWSDK

SEQ ID NO: 717 - DNA, 693 bp, synthetic construct
  misc_feature 1..693: note = Variant of adenylate kinase
  source 1..693: mol_type = other DNA
atgcaccatcatcaccatcacgggggctccggcatgggggcatatctggtgttcttaggtccgccgggcgcgggaaaaggtacccaaggccgtcgcattcaggaaaagactggcatcccgcatattagcacgggcgatatcttccgtgacatcgtcgctaagcaaaacgatgaactggcctcgaaaattaaagaacagatggagaaaggtgaactcgttccagatgaactgggtaatgcggtagtaaaacgccgcctgtcggagaaagactgcgaaaaaggctttattttggatggttatccgcgtaccgtggctcaagcggaatatctggatagttttcttgaatcccagaatcgccagttgacagccgccgtgctgttcaaagtccccgaagatgaagttgtgcaacgtttaacctctcgcctgatctgtccgaaatgcgggcgtatctacaacatgatttttctgccaccaaaagaagacgagctgtgtgacgattgcggtgtcggcttagtacagcgtgatgatgataaggaagaaacggtccgtcaccgcctgaaagtctaccttgagaagacccagccggtcattgactattatagtaagaaaggtattctcaaacgcgtagatgggtcgcaaggaatcgacaacgttgttgcagaagtcctggggattctgggttggagcgataag

SEQ ID NO: 718 - protein, 231 aa, synthetic construct
  REGION 1..231: note = Variant of adenylate kinase
MHHHHHHGGSGMGAYLVFLGPPGAGKGTQGRRIQEKTGIPHISTGDIFRDIVAKQNDELASKIKEQMEKGELVPDELGNAVVKRRLSEKDCEKGFILDGYPRTVAQAEYLDSFLESQNRQLTAAVLFKVPEDEVVQRLTSRLICPKCGRIYNMIFLPPKEDELCDDCGVGLVQRDDDKEETVRHRLKVYLEKTQPVIDYYSKKGILKRVDGSQGIDNVVAEVLGILGWSDK

SEQ ID NO: 719 - DNA, 693 bp, synthetic construct
  misc_feature 1..693: note = Variant of adenylate kinase
  source 1..693: mol_type = other DNA
atgcaccatcatcaccatcacgggggctccggcatgggggcatatctggtgttcttaggtccgccgggcgcgggaaaaggtacccaaggccgtcgcattcaggaaaagactggcatcccgcatattagcacgggcgatatcttccgtgacatcgtcgctaagcaaaacgatgaatgggcctcgaaaattaaagaaatcatggagaaaggtgaactcgttccagatgaactgggtaatgcggtagtaaaacgccgcctgtcggagaaagactgcgaaaaaggctttattttggatggttatccgcgtaccgtggctcaagcggaatatctggatagttttcttgaatcccagaatcgccagttgacagccgccgtgctgttcaaagtccccgaagatgaagttgtgcaacgtttaacctctcgcctgatctgtccgaaatgcgggcgtatctacaacatgatttttctgccaccaaaagaagacgagctgtgtgacgattgcggtgtcggcttagtacagcgtgatgatgataaggaagaaacggtccgtcaccgcctgaaagtctaccttgagaagacccagccggtcattgactattatagtaagaaaggtattctcaaacgcgtagatgggtcgcaaggaatcgacaacgttgttgcagaagtcctggggattctgggttggagcgataag

SEQ ID NO: 720 - protein, 231 aa, synthetic construct
  REGION 1..231: note = Variant of adenylate kinase
MHHHHHHGGSGMGAYLVFLGPPGAGKGTQGRRIQEKTGIPHISTGDIFRDIVAKQNDEWASKIKEIMEKGELVPDELGNAVVKRRLSEKDCEKGFILDGYPRTVAQAEYLDSFLESQNRQLTAAVLFKVPEDEVVQRLTSRLICPKCGRIYNMIFLPPKEDELCDDCGVGLVQRDDDKEETVRHRLKVYLEKTQPVIDYYSKKGILKRVDGSQGIDNVVAEVLGILGWSDK

SEQ ID NO: 721 - DNA, 693 bp, synthetic construct
  misc_feature 1..693: note = Variant of adenylate kinase
  source 1..693: mol_type = other DNA
atgcaccatcatcaccatcacgggggctccggcatgggggcatatctggtgttcttaggtccgccgggcgcgggaaaaggtacccaaggccgtcgcattcaggaaaagactggcatcccgcatattagcacgggcgatatcttccgtgacatcgtcgctaagcaaaacgatgaaggggcctcgaaaattaaagaaatcatggagaaaggtgaactcgttccagatgaactgggtaatgcggtagtaaaacgccgcctgtcggagaaagactgcgaaaaaggctttattttggatggttatccgcgtaccgtggctcaagcggaatatctggatagttttcttgaatcccagaatcgccagttgacagccgccgtgctgttcaaagtccccgaagatgaagttgtgcaacgtttaacctctcgcctgatctgtccgaaatgcgggcgtatctacaacatgatttttctgccaccaaaagaagacgagctgtgtgacgattgcggtgtcggcttagtacagcgtgatgatgataaggaagaaacggtccgtcaccgcctgaaagtctaccttgagaagacccagccggtcattgactattatagtaagaaaggtattctcaaacgcgtagatgggtcgcaaggaatcgacaacgttgttgcagaagtcctggggattctgggttggagcgataag

SEQ ID NO: 722 - protein, 231 aa, synthetic construct
  REGION 1..231: note = Variant of adenylate kinase
MHHHHHHGGSGMGAYLVFLGPPGAGKGTQGRRIQEKTGIPHISTGDIFRDIVAKQNDEGASKIKEIMEKGELVPDELGNAVVKRRLSEKDCEKGFILDGYPRTVAQAEYLDSFLESQNRQLTAAVLFKVPEDEVVQRLTSRLICPKCGRIYNMIFLPPKEDELCDDCGVGLVQRDDDKEETVRHRLKVYLEKTQPVIDYYSKKGILKRVDGSQGIDNVVAEVLGILGWSDK

SEQ ID NO: 723 - DNA, 693 bp, synthetic construct
  misc_feature 1..693: note = Variant of adenylate kinase
  source 1..693: mol_type = other DNA
atgcaccatcatcaccatcacgggggctccggcatgggggcatatctggtgttcttaggtccgccgggcgcgggaaaaggtacccaaggccgtcgcattcaggaaaagactggcatcccgcatattagcacgggcgatatcttccgtgacatcgtcgctaagcaaaacgatgaactggcctcgaaaattaaagaaatcatggagaaaggtgaactcgttccagatgaactgggtaatgcggtagtaaaacgccgcctgtcggagaaagactgcgaaaaaggctttattttggatggttatccgcgtaccgtggctcaagcggaatatctggatagttttcttgaatcccagaatcgccagttgacagccgccgtgctgttcaaagtccccgaagatgaagttgtgcaacgtttaacctctcgcctgatctgtccgaaatgcatgcgtatctacaacatgatttttctgccaccaaaagaagacgagctgtgtgacgattgcggtgtcggcttagtacagcgtgatgatgataaggaagaaacggtccgtcaccgcctgaaagtctaccttgagaagacccagccggtcattgactattatagtaagaaaggtattctcaaacgcgtagatgggtcgcaaggaatcgacaacgttgttgcagaagtcctggggattctgggttggagcgataag

SEQ ID NO: 724 - protein, 231 aa, synthetic construct
  REGION 1..231: note = Variant of adenylate kinase
MHHHHHHGGSGMGAYLVFLGPPGAGKGTQGRRIQEKTGIPHISTGDIFRDIVAKQNDELASKIKEIMEKGELVPDELGNAVVKRRLSEKDCEKGFILDGYPRTVAQAEYLDSFLESQNRQLTAAVLFKVPEDEVVQRLTSRLICPKCMRIYNMIFLPPKEDELCDDCGVGLVQRDDDKEETVRHRLKVYLEKTQPVIDYYSKKGILKRVDGSQGIDNVVAEVLGILGWSDK

SEQ ID NO: 725 - DNA, 693 bp, synthetic construct
  misc_feature 1..693: note = Variant of adenylate kinase
  source 1..693: mol_type = other DNA
atgcaccatcatcaccatcacgggggctccggcatgggggcatatctggtgttcttaggtccgccgggcgcgggaaaaggtacccaaggccgtcgcattcaggaaaagactggcatcccgcatattagcacgggcgatatcttccgtgacatcgtcgctaagcaaaacgatgaaatggcctcgaaaattaaagaaatcatggagaaaggtgaactcgttccagatgaactgggtaatgcggtagtaaaacgccgcctgtcggagaaagactgcgaaaaaggctttattttggatggttatccgcgtaccgtggctcaagcggaatatctggatagttttcttgaatcccagaatcgccagttgacagccgccgtgctgttcaaagtccccgaagatgaagttgtgcaacgtttaacctctcgcctgatctgtccgaaatgcgggcgtatctacaacatgatttttctgccaccaaaagaagacgagctgtgtgacgattgcggtgtcggcttagtacagcgtgatgatgataaggaagaaacggtccgtcaccgcctgaaagtctaccttgagaagacccagccggtcattgactattatagtaagaaaggtattctcaaacgcgtagatgggtcgcaaggaatcgacaacgttgttgcagaagtcctggggattctgggttggagcgataag

SEQ ID NO: 726 - protein, 231 aa, synthetic construct
  REGION 1..231: note = Variant of adenylate kinase
MHHHHHHGGSGMGAYLVFLGPPGAGKGTQGRRIQEKTGIPHISTGDIFRDIVAKQNDEMASKIKEIMEKGELVPDELGNAVVKRRLSEKDCEKGFILDGYPRTVAQAEYLDSFLESQNRQLTAAVLFKVPEDEVVQRLTSRLICPKCGRIYNMIFLPPKEDELCDDCGVGLVQRDDDKEETVRHRLKVYLEKTQPVIDYYSKKGILKRVDGSQGIDNVVAEVLGILGWSDK

SEQ ID NO: 727 - DNA, 693 bp, synthetic construct
  misc_feature 1..693: note = Variant of adenylate kinase
  source 1..693: mol_type = other DNA
atgcaccatcatcaccatcacgggggctccggcatgggggcatatctggtgttcttaggtccgccgggcgcgggaaaaggtacccaaggccgtcgcattcaggaaaagactggcatcccgcatattagcacgggcgatatcttccgtgacatcgtcgctaagcaaaacgatgaactggcctcgaaaattaaagaaatcatggagaaaggtgaactcgttccagatgaactgggtaatgcggtagtaaaacgccgcctgtcggagaaagactgcgaaaaaggctttattttggatggttatccgcgtaccgtggctcaagcggaatatctggatagttttcttgaatcccagaatcgccagttgacagccgccgtgctgttcaaagtccccgaagatgaagttagtcaacgtttaacctctcgcctgatctgtccgaaatgcgggcgtatctacaacatgatttttctgccaccaaaagaagacgagctgtgtgacgattgcggtgtcggcttagtacagcgtgatgatgataaggaagaaacggtccgtcaccgcctgaaagtctaccttgagaagacccagccggtcattgactattatagtaagaaaggtattctcaaacgcgtagatgggtcgcaaggaatcgacaacgttgttgcagaagtcctggggattctgggttggagcgataag

SEQ ID NO: 728 - protein, 231 aa, synthetic construct
  REGION 1..231: note = Variant of adenylate kinase
MHHHHHHGGSGMGAYLVFLGPPGAGKGTQGRRIQEKTGIPHISTGDIFRDIVAKQNDELASKIKEIMEKGELVPDELGNAVVKRRLSEKDCEKGFILDGYPRTVAQAEYLDSFLESQNRQLTAAVLFKVPEDEVSQRLTSRLICPKCGRIYNMIFLPPKEDELCDDCGVGLVQRDDDKEETVRHRLKVYLEKTQPVIDYYSKKGILKRVDGSQGIDNVVAEVLGILGWSDK

SEQ ID NO: 729 - DNA, 693 bp, synthetic construct
  misc_feature 1..693: note = Variant of adenylate kinase
  source 1..693: mol_type = other DNA
atgcaccatcatcaccatcacgggggctccggcatgggggcatatctggtgttcttaggtccgccgggcgcgggaaaaggtacccaaggccgtcgcattcaggaaaagactggcatcccgcatattagcacgggcgatatcttccgtgacatcgtcgctaagcaaaacgatgaactggcctcgaaaattaaagaaatcatgttgaaaggtgaactcgttccagatgaactgggtaatgcggtagtaaaacgccgcctgtcggagaaagactgcgaaaaaggctttattttggatggttatccgcgtaccgtggctcaagcggaatatctggatagttttcttgaatcccagaatcgccagttgacagccgccgtgctgttcaaagtccccgaagatgaagttgtgcaacgtttaacctctcgcctgatctgtccgaaatgcgggcgtatctacaacatgatttttctgccaccaaaagaagacgagctgtgtgacgattgcggtgtcggcttagtacagcgtgatgatgataaggaagaaacggtccgtcaccgcctgaaagtctaccttgagaagacccagccggtcattgactattatagtaagaaaggtattctcaaacgcgtagatgggtcgcaaggaatcgacaacgttgttgcagaagtcctggggattctgggttggagcgataag

SEQ ID NO: 730 - protein, 231 aa, synthetic construct
  REGION 1..231: note = Variant of adenylate kinase
MHHHHHHGGSGMGAYLVFLGPPGAGKGTQGRRIQEKTGIPHISTGDIFRDIVAKQNDELASKIKEIMLKGELVPDELGNAVVKRRLSEKDCEKGFILDGYPRTVAQAEYLDSFLESQNRQLTAAVLFKVPEDEVVQRLTSRLICPKCGRIYNMIFLPPKEDELCDDCGVGLVQRDDDKEETVRHRLKVYLEKTQPVIDYYSKKGILKRVDGSQGIDNVVAEVLGILGWSDK

SEQ ID NO: 731 - DNA, 693 bp, synthetic construct
  misc_feature 1..693: note = Variant of adenylate kinase
  source 1..693: mol_type = other DNA
atgcaccatcatcaccatcacgggggctccggcatgggggcatatctggtgttcttaggtccgccgggcgcgggaaaaggtacccaaggccgtcgcattcaggaaaagactggcatcccgcatattagcacgggcgatatcttccgtgacatcgtcgctaagcaaaacgatgaactggcctcgaaaattaaagaaatcatggagaaaggtgaactcgttccagatgaactgggtaatgcggtagtaaaacgccgcctgtcggagaaagactgcgaaaaaggctttattttggatggttatccgcgtaccgtggctcaagcggaatatctggatagttttcttgaatcccagaatcgccagttgacagccgccgtgctgttcaaagtccccgaagatgaagttgtgcaacgtttagcgtctcgcctgatctgtccgaaatgcgggcgtatctacaacatgatttttctgccaccaaaagaagacgagctgtgtgacgattgcggtgtcggcttagtacagcgtgatgatgataaggaagaaacggtccgtcaccgcctgaaagtctaccttgagaagacccagccggtcattgactattatagtaagaaaggtattctcaaacgcgtagatgggtcgcaaggaatcgacaacgttgttgcagaagtcctggggattctgggttggagcgataag

SEQ ID NO: 732 - protein, 231 aa, synthetic construct
  REGION 1..231: note = Variant of adenylate kinase
MHHHHHHGGSGMGAYLVFLGPPGAGKGTQGRRIQEKTGIPHISTGDIFRDIVAKQNDELASKIKEIMEKGELVPDELGNAVVKRRLSEKDCEKGFILDGYPRTVAQAEYLDSFLESQNRQLTAAVLFKVPEDEVVQRLASRLICPKCGRIYNMIFLPPKEDELCDDCGVGLVQRDDDKEETVRHRLKVYLEKTQPVIDYYSKKGILKRVDGSQGIDNVVAEVLGILGWSDK

SEQ ID NO: 733 - DNA, 693 bp, synthetic construct
  misc_feature 1..693: note = Variant of adenylate kinase
  source 1..693: mol_type = other DNA
atgcaccatcatcaccatcacgggggctccggcatgggggcatatctggtgttcttaggtccgccgggcgcgggaaaaggtacccaaggccgtcgcattcaggaaaagactggcatcccgcatattagcacgggcgatatcttccgtgacatcgtcgctaagcaaaacgatgaactggcctcgaaaattaaagaaatcatggagaaaggtgaactcgttccagatgaactgggtaatgcggtagtaaaacgccgcctgtcggagaaagactgcgaaaaaggctttattttggatggttatccgcgtaccgtggctcaagcggaatatctggatagttttcttgaatcccagaatcgccagttgacagccgccgtgctgttcaaagtccccgaagatgaagttgtgcaacgtttaacctctcgcctgatctgtccgaaatgcgggcgtatctacaacatgatttttctgccaccaaaagaagacgagctgtgtgacgattgcggtgtcggcttagtacagcgtgatgatgataaggaagaaacggtccgtattcgcctgaaagtctaccttgagaagacccagccggtcattgactattatagtaagaaaggtattctcaaacgcgtagatgggtcgcaaggaatcgacaacgttgttgcagaagtcctggggattctgggttggagcgataag

SEQ ID NO: 734 - protein, 231 aa, synthetic construct
  REGION 1..231: note = Variant of adenylate kinase
MHHHHHHGGSGMGAYLVFLGPPGAGKGTQGRRIQEKTGIPHISTGDIFRDIVAKQNDELASKIKEIMEKGELVPDELGNAVVKRRLSEKDCEKGFILDGYPRTVAQAEYLDSFLESQNRQLTAAVLFKVPEDEVVQRLTSRLICPKCGRIYNMIFLPPKEDELCDDCGVGLVQRDDDKEETVRIRLKVYLEKTQPVIDYYSKKGILKRVDGSQGIDNVVAEVLGILGWSDK

SEQ ID NO: 735 - DNA, 693 bp, synthetic construct
  misc_feature 1..693: note = Variant of adenylate kinase
  source 1..693: mol_type = other DNA
atgcaccatcatcaccatcacgggggctccggcatgggggcatatctggtgttcttaggtccgccgggcgcgggaaaaggtacccaaggccgtcgcattcaggaaaagactggcatcccgcatattagcacgggcgatatcttccgtgacatcgtcgctaagcaaaacgatgaactggcctcgaaaattaaagaaatcatgaggaaaggtgaactcgttccagatgaactgggtaatgcggtagtaaaacgccgcctgtcggagaaagactgcgaaaaaggctttattttggatggttatccgcgtaccgtggctcaagcggaatatctggatagttttcttgaatcccagaatcgccagttgacagccgccgtgctgttcaaagtccccgaagatgaagttgtgcaacgtttaacctctcgcctgatctgtccgaaatgcgggcgtatctacaacatgatttttctgccaccaaaagaagacgagctgtgtgacgattgcggtgtcggcttagtacagcgtgatgatgataaggaagaaacggtccgtcaccgcctgaaagtctaccttgagaagacccagccggtcattgactattatagtaagaaaggtattctcaaacgcgtagatgggtcgcaaggaatcgacaacgttgttgcagaagtcctggggattctgggttggagcgataag

SEQ ID NO: 736 - protein, 231 aa, synthetic construct
  REGION 1..231: note = Variant of adenylate kinase
MHHHHHHGGSGMGAYLVFLGPPGAGKGTQGRRIQEKTGIPHISTGDIFRDIVAKQNDELASKIKEIMRKGELVPDELGNAVVKRRLSEKDCEKGFILDGYPRTVAQAEYLDSFLESQNRQLTAAVLFKVPEDEVVQRLTSRLICPKCGRIYNMIFLPPKEDELCDDCGVGLVQRDDDKEETVRHRLKVYLEKTQPVIDYYSKKGILKRVDGSQGIDNVVAEVLGILGWSDK

SEQ ID NO: 737 - DNA, 693 bp, synthetic construct
  misc_feature 1..693: note = Variant of adenylate kinase
  source 1..693: mol_type = other DNA
atgcaccatcatcaccatcacgggggctccggcatgggggcatatctggtgttcttaggtccgccgggcgcgggaaaaggtacccaaggccgtcgcattcaggaaaagactggcatcccgcatattagcacgggcgatatcttccgtgacatcgtcgctaagcaaaacgatgaactggcctcgaaaattaaagaaatcatggagaaaggtgaactcgttccagatgaactgggtaatgcggtagtaaaacgccgcctgtcggagaaagactgcgaaaaaggctttattttggatggttatccgcgtaccgtggctcaagcggaatatctggatagttttcttgaatcccagaatcgccagttgacagccgccgtgctgttcaaagtccccgaagatgaagttgtgcaacgtttaacctctcgcctgatctgtccgaaatgcgggcgtatctacaacatgatttttctgccaccaaaagaagacgagctgtgtgacgattgcggtgtcggcttagtacagcgtgatgatgataaggaagaaacggtccgtgttcgcctgaaagtctaccttgagaagacccagccggtcattgactattatagtaagaaaggtattctcaaacgcgtagatgggtcgcaaggaatcgacaacgttgttgcagaagtcctggggattctgggttggagcgataag

SEQ ID NO: 738 - protein, 231 aa, synthetic construct
  REGION 1..231: note = Variant of adenylate kinase
MHHHHHHGGSGMGAYLVFLGPPGAGKGTQGRRIQEKTGIPHISTGDIFRDIVAKQNDELASKIKEIMEKGELVPDELGNAVVKRRLSEKDCEKGFILDGYPRTVAQAEYLDSFLESQNRQLTAAVLFKVPEDEVVQRLTSRLICPKCGRIYNMIFLPPKEDELCDDCGVGLVQRDDDKEETVRVRLKVYLEKTQPVIDYYSKKGILKRVDGSQGIDNVVAEVLGILGWSDK

SEQ ID NO: 739 - DNA, 693 bp, synthetic construct
  misc_feature 1..693: note = Variant of adenylate kinase
  source 1..693: mol_type = other DNA
atgcaccatcatcaccatcacgggggctccggcatgggggcatatctggtgttcttaggtccgccgggcgcgggaaaaggtacccaaggccgtcgcattcaggaaaagactggcatcccgcatattagcacgggcgatatcttccgtgacatcgtcgctaagcaaaacgatgaactggcctcgaaaattaaagaatctatggagaaaggtgaactcgttccagatgaactgggtaatgcggtagtaaaacgccgcctgtcggagaaagactgcgaaaaaggctttattttggatggttatccgcgtaccgtggctcaagcggaatatctggatagttttcttgaatcccagaatcgccagttgacagccgccgtgctgttcaaagtccccgaagatgaagttgtgcaacgtttaacctctcgcctgatctgtccgaaatgcgggcgtatctacaacatgatttttctgccaccaaaagaagacgagctgtgtgacgattgcggtgtcggcttagtacagcgtgatgatgataaggaagaaacggtccgtcaccgcctgaaagtctaccttgagaagacccagccggtcattgactattatagtaagaaaggtattctcaaacgcgtagatgggtcgcaaggaatcgacaacgttgttgcagaagtcctggggattctgggttggagcgataag

SEQ ID NO: 740 - protein, 231 aa, synthetic construct
  REGION 1..231: note = Variant of adenylate kinase
MHHHHHHGGSGMGAYLVFLGPPGAGKGTQGRRIQEKTGIPHISTGDIFRDIVAKQNDELASKIKESMEKGELVPDELGNAVVKRRLSEKDCEKGFILDGYPRTVAQAEYLDSFLESQNRQLTAAVLFKVPEDEVVQRLTSRLICPKCGRIYNMIFLPPKEDELCDDCGVGLVQRDDDKEETVRHRLKVYLEKTQPVIDYYSKKGILKRVDGSQGIDNVVAEVLGILGWSDK

SEQ ID NO: 741 - DNA, 693 bp, synthetic construct
  misc_feature 1..693: note = Variant of adenylate kinase
  source 1..693: mol_type = other DNA
atgcaccatcatcaccatcacgggggctccggcatgggggcatatctggtgttcttaggtccgccgggcgcgggaaaaggtacccaaggccgtcgcattcaggaaaagactggcatcccgcatattagcacgggcgatatcttccgtgacatcgtcgctaagcaaaacgatgaactggcctcgaaaattaaagaaatcatgcagaaaggtgaactcgttccagatgaactgggtaatgcggtagtaaaacgccgcctgtcggagaaagactgcgaaaaaggctttattttggatggttatccgcgtaccgtggctcaagcggaatatctggatagttttcttgaatcccagaatcgccagttgacagccgccgtgctgttcaaagtccccgaagatgaagttgtgcaacgtttaacctctcgcctgatctgtccgaaatgcgggcgtatctacaacatgatttttctgccaccaaaagaagacgagctgtgtgacgattgcggtgtcggcttagtacagcgtgatgatgataaggaagaaacggtccgtcaccgcctgaaagtctaccttgagaagacccagccggtcattgactattatagtaagaaaggtattctcaaacgcgtagatgggtcgcaaggaatcgacaacgttgttgcagaagtcctggggattctgggttggagcgataag

SEQ ID NO: 742 - protein, 231 aa, synthetic construct
  REGION 1..231: note = Variant of adenylate kinase
MHHHHHHGGSGMGAYLVFLGPPGAGKGTQGRRIQEKTGIPHISTGDIFRDIVAKQNDELASKIKEIMQKGELVPDELGNAVVKRRLSEKDCEKGFILDGYPRTVAQAEYLDSFLESQNRQLTAAVLFKVPEDEVVQRLTSRLICPKCGRIYNMIFLPPKEDELCDDCGVGLVQRDDDKEETVRHRLKVYLEKTQPVIDYYSKKGILKRVDGSQGIDNVVAEVLGILGWSDK

SEQ ID NO: 743 - DNA, 693 bp, synthetic construct
  misc_feature 1..693: note = Variant of adenylate kinase
  source 1..693: mol_type = other DNA
atgcaccatcatcaccatcacgggggctccggcatgggggcatatctggtgttcttaggtccgccgggcgcgggaaaaggtacccaaggccgtcgcattcaggaaaagactggcatcccgcatattagcacgggcgatatcttccgtgacatcgtcgctaagcaaaacgatgaactggcctcgaaaattaaagaaatcatggagaaaggtgaactcgttccagatgaactgggtaatgcgattgtaaaacgccgcctgtcggagaaagactgcgaaaaaggctttattttggatggttatccgcgtaccgtggctcaagcggaatatctggatagttttcttgaatcccagaatcgccagttgacagccgccgtgctgttcaaagtccccgaagatgaagttgtgcaacgtttaacctctcgcctgatctgtccgaaatgcgggcgtatctacaacatgatttttctgccaccaaaagaagacgagctgtgtgacgattgcggtgtcggcttagtacagcgtgatgatgataaggaagaaacggtccgtcaccgcctgaaagtctaccttgagaagacccagccggtcattgactattatagtaagaaaggtattctcaaacgcgtagatgggtcgcaaggaatcgacaacgttgttgcagaagtcctggggattctgggttggagcgataag

SEQ ID NO: 744 - protein, 231 aa, synthetic construct
  REGION 1..231: note = Variant of adenylate kinase
MHHHHHHGGSGMGAYLVFLGPPGAGKGTQGRRIQEKTGIPHISTGDIFRDIVAKQNDELASKIKEIMEKGELVPDELGNAIVKRRLSEKDCEKGFILDGYPRTVAQAEYLDSFLESQNRQLTAAVLFKVPEDEVVQRLTSRLICPKCGRIYNMIFLPPKEDELCDDCGVGLVQRDDDKEETVRHRLKVYLEKTQPVIDYYSKKGILKRVDGSQGIDNVVAEVLGILGWSDK

SEQ ID NO: 745 - DNA, 693 bp, synthetic construct
  misc_feature 1..693: note = Variant of adenylate kinase
  source 1..693: mol_type = other DNA
atgcaccatcatcaccatcacgggggctccggcatgggggcatatctggtgttcttaggtccgccgggcgcgggaaaaggtacccaaggccgtcgcattcaggaaaagactggcatcccgcatattagcacgggcgatatcttccgtgacatcgtcgctaagcaaaacgatgaactggcctcgaaaattaaagaaatcatggttaaaggtgaactcgttccagatgaactgggtaatgcggtagtaaaacgccgcctgtcggagaaagactgcgaaaaaggctttattttggatggttatccgcgtaccgtggctcaagcggaatatctggatagttttcttgaatcccagaatcgccagttgacagccgccgtgctgttcaaagtccccgaagatgaagttgtgcaacgtttaacctctcgcctgatctgtccgaaatgcgggcgtatctacaacatgatttttctgccaccaaaagaagacgagctgtgtgacgattgcggtgtcggcttagtacagcgtgatgatgataaggaagaaacggtccgtcaccgcctgaaagtctaccttgagaagacccagccggtcattgactattatagtaagaaaggtattctcaaacgcgtagatgggtcgcaaggaatcgacaacgttgttgcagaagtcctggggattctgggttggagcgataag

SEQ ID NO: 746 - protein, 231 aa, synthetic construct
  REGION 1..231: note = Variant of adenylate kinase
MHHHHHHGGSGMGAYLVFLGPPGAGKGTQGRRIQEKTGIPHISTGDIFRDIVAKQNDELASKIKEIMVKGELVPDELGNAVVKRRLSEKDCEKGFILDGYPRTVAQAEYLDSFLESQNRQLTAAVLFKVPEDEVVQRLTSRLICPKCGRIYNMIFLPPKEDELCDDCGVGLVQRDDDKEETVRHRLKVYLEKTQPVIDYYSKKGILKRVDGSQGIDNVVAEVLGILGWSDK

SEQ ID NO: 747 - DNA, 693 bp, synthetic construct
  misc_feature 1..693: note = Variant of adenylate kinase
  source 1..693: mol_type = other DNA
atgcaccatcatcaccatcacgggggctccggcatgggggcatatctggtgttcttaggtccgccgggcgcgggaaaaggtacccaaggccgtcgcattcaggaaaagactggcatcccgcatattagcacgggcgatatcttccgtgacatcgtcgctaagcaaaacgatgaactggcctcgaaaattaaatttatcatggagaaaggtgaactcgttccagatgaactgggtaatgcggtagtaaaacgccgcctgtcggagaaagactgcgaaaaaggctttattttggatggttatccgcgtaccgtggctcaagcggaatatctggatagttttcttgaatcccagaatcgccagttgacagccgccgtgctgttcaaagtccccgaagatgaagttgtgcaacgtttaacctctcgcctgatctgtccgaaatgcgggcgtatctacaacatgatttttctgccaccaaaagaagacgagctgtgtgacgattgcggtgtcggcttagtacagcgtgatgatgataaggaagaaacggtccgtcaccgcctgaaagtctaccttgagaagacccagccggtcattgactattatagtaagaaaggtattctcaaacgcgtagatgggtcgcaaggaatcgacaacgttgttgcagaagtcctggggattctgggttggagcgataag

SEQ ID NO: 748 - protein, 231 aa, synthetic construct
  REGION 1..231: note = Variant of adenylate kinase
MHHHHHHGGSGMGAYLVFLGPPGAGKGTQGRRIQEKTGIPHISTGDIFRDIVAKQNDELASKIKFIMEKGELVPDELGNAVVKRRLSEKDCEKGFILDGYPRTVAQAEYLDSFLESQNRQLTAAVLFKVPEDEVVQRLTSRLICPKCGRIYNMIFLPPKEDELCDDCGVGLVQRDDDKEETVRHRLKVYLEKTQPVIDYYSKKGILKRVDGSQGIDNVVAEVLGILGWSDK

SEQ ID NO: 749 - DNA, 693 bp, synthetic construct
  misc_feature 1..693: note = Variant of adenylate kinase
  source 1..693: mol_type = other DNA
atgcaccatcatcaccatcacgggggctccggcatgggggcatatctggtgttcttaggtccgccgggcgcgggaaaaggtacccaaggccgtcgcattcaggaaaagactggcatcccgcatattagcacgggcgatatcttccgtgacatcgtcgctaagcaaaacgatgaactggcctcgaaaattaaagaaatcatggagaaaggtgaactcgttccagatgaactgggtaatgcggtagtaaaacgccgcctgtcggagaaagactgcgaaaaaggctttattttggatggttatccgcgtaccgtggctcaagcggaatatctggatagttttcttgaatcccagaatcgccagttgacagccgccgtgctgttcaaagtccccgaagatgaagttgtgcaacgtttaacctctcgcctgatctgtccgaaatgcgggcgtatctacaactcgatttttctgccaccaaaagaagacgagctgtgtgacgattgcggtgtcggcttagtacagcgtgatgatgataaggaagaaacggtccgtcaccgcctgaaagtctaccttgagaagacccagccggtcattgactattatagtaagaaaggtattctcaaacgcgtagatgggtcgcaaggaatcgacaacgttgttgcagaagtcctggggattctgggttggagcgataag

SEQ ID NO: 750 - protein, 231 aa, synthetic construct
  REGION 1..231: note = Variant of adenylate kinase
MHHHHHHGGSGMGAYLVFLGPPGAGKGTQGRRIQEKTGIPHISTGDIFRDIVAKQNDELASKIKEIMEKGELVPDELGNAVVKRRLSEKDCEKGFILDGYPRTVAQAEYLDSFLESQNRQLTAAVLFKVPEDEVVQRLTSRLICPKCGRIYNSIFLPPKEDELCDDCGVGLVQRDDDKEETVRHRLKVYLEKTQPVIDYYSKKGILKRVDGSQGIDNVVAEVLGILGWSDK

SEQ ID NO: 751 - DNA, 693 bp, synthetic construct
  misc_feature 1..693: note = Variant of adenylate kinase
  source 1..693: mol_type = other DNA
atgcaccatcatcaccatcacgggggctccggcatgggggcatatctggtgttcttaggtccgccgggcgcgggaaaaggtacccaaggccgtcgcattcaggaaaagactggcatcccgcatattagcacgggcgatatcttccgtgacatcgtcgctaagcaaaacgatgaactggcctcgaaaattaaagaaatcatggagaaaggtgaactcgttccagatgaactgggtaatgcggtagtaaaacgccgcctgtcggagaaagactgcgaaaaaggctttattttggatggttatccgcgtaccgtggctcaagcggaatatctggatagttttcttgaatcccagaatcgccagttgacagccgccgtggtgttcaaagtccccgaagatgaagttgtgcaacgtttaacctctcgcctgatctgtccgaaatgcgggcgtatctacaacatgatttttctgccaccaaaagaagacgagctgtgtgacgattgcggtgtcggcttagtacagcgtgatgatgataaggaagaaacggtccgtcaccgcctgaaagtctaccttgagaagacccagccggtcattgactattatagtaagaaaggtattctcaaacgcgtagatgggtcgcaaggaatcgacaacgttgttgcagaagtcctggggattctgggttggagcgataag

SEQ ID NO: 752 - protein, 231 aa, synthetic construct
  REGION 1..231: note = Variant of adenylate kinase
MHHHHHHGGSGMGAYLVFLGPPGAGKGTQGRRIQEKTGIPHISTGDIFRDIVAKQNDELASKIKEIMEKGELVPDELGNAVVKRRLSEKDCEKGFILDGYPRTVAQAEYLDSFLESQNRQLTAAVVFKVPEDEVVQRLTSRLICPKCGRIYNMIFLPPKEDELCDDCGVGLVQRDDDKEETVRHRLKVYLEKTQPVIDYYSKKGILKRVDGSQGIDNVVAEVLGILGWSDK

SEQ ID NO: 753 - DNA, 693 bp, synthetic construct
  misc_feature 1..693: note = Variant of adenylate kinase
  source 1..693: mol_type = other DNA
atgcaccatcatcaccatcacgggggctccggcatgggggcatatctggtgttcttaggtccgccgggcgcgggaaaaggtacccaaggccgtcgcattcaggaaaagactggcatcccgcatattagcacgggcgatatcttccgtgacatcgtcgctaagcaaaacgatgaactggcctcgaaaattaaagaaatcatggctaaaggtgaactcgttccagatgaactgggtaatgcggtagtaaaacgccgcctgtcggagaaagactgcgaaaaaggctttattttggatggttatccgcgtaccgtggctcaagcggaatatctggatagttttcttgaatcccagaatcgccagttgacagccgccgtgctgttcaaagtccccgaagatgaagttgtgcaacgtttaacctctcgcctgatctgtccgaaatgcgggcgtatctacaacatgatttttctgccaccaaaagaagacgagctgtgtgacgattgcggtgtcggcttagtacagcgtgatgatgataaggaagaaacggtccgtcaccgcctgaaagtctaccttgagaagacccagccggtcattgactattatagtaagaaaggtattctcaaacgcgtagatgggtcgcaaggaatcgacaacgttgttgcagaagtcctggggattctgggttggagcgataag

SEQ ID NO: 754 - protein, 231 aa, synthetic construct
  REGION 1..231: note = Variant of adenylate kinase
MHHHHHHGGSGMGAYLVFLGPPGAGKGTQGRRIQEKTGIPHISTGDIFRDIVAKQNDELASKIKEIMAKGELVPDELGNAVVKRRLSEKDCEKGFILDGYPRTVAQAEYLDSFLESQNRQLTAAVLFKVPEDEVVQRLTSRLICPKCGRIYNMIFLPPKEDELCDDCGVGLVQRDDDKEETVRHRLKVYLEKTQPVIDYYSKKGILKRVDGSQGIDNVVAEVLGILGWSDK

SEQ ID NO: 755 - DNA, 693 bp, synthetic construct
  misc_feature 1..693: note = Variant of adenylate kinase
  source 1..693: mol_type = other DNA
atgcaccatcatcaccatcacgggggctccggcatgggggcatatctggtgttcttaggtccgccgggcgcgggaaaaggtacccaaggccgtcgcattcaggaaaagactggcatcccgcatattagcacgggcgatatcttccgtgacatcgtcgctaagcaaaacgatgaactggcctcgaaaattaaagaaactatggagaaaggtgaactcgttccagatgaactgggtaatgcggtagtaaaacgccgcctgtcggagaaagactgcgaaaaaggctttattttggatggttatccgcgtaccgtggctcaagcggaatatctggatagttttcttgaatcccagaatcgccagttgacagccgccgtgctgttcaaagtccccgaagatgaagttgtgcaacgtttaacctctcgcctgatctgtccgaaatgcgggcgtatctacaacatgatttttctgccaccaaaagaagacgagctgtgtgacgattgcggtgtcggcttagtacagcgtgatgatgataaggaagaaacggtccgtcaccgcctgaaagtctaccttgagaagacccagccggtcattgactattatagtaagaaaggtattctcaaacgcgtagatgggtcgcaaggaatcgacaacgttgttgcagaagtcctggggattctgggttggagcgataag

SEQ ID NO: 756 - protein, 231 aa, synthetic construct
  REGION 1..231: note = Variant of adenylate kinase
MHHHHHHGGSGMGAYLVFLGPPGAGKGTQGRRIQEKTGIPHISTGDIFRDIVAKQNDELASKIKETMEKGELVPDELGNAVVKRRLSEKDCEKGFILDGYPRTVAQAEYLDSFLESQNRQLTAAVLFKVPEDEVVQRLTSRLICPKCGRIYNMIFLPPKEDELCDDCGVGLVQRDDDKEETVRHRLKVYLEKTQPVIDYYSKKGILKRVDGSQGIDNVVAEVLGILGWSDK

SEQ ID NO: 757 - DNA, 693 bp, synthetic construct
  misc_feature 1..693: note = Variant of adenylate kinase
  source 1..693: mol_type = other DNA
atgcaccatcatcaccatcacgggggctccggcatgggggcatatctggtgttcttaggtccgccgggcgcgggaaaaggtacccaaggccgtcgcattcaggaaaagactggcatcccgcatattagcacgggcgatatcttccgttgtatcgtcgctaagcaaaacgatgaactggcctcgaaaattaaagaaatcatggagaaaggtgaactcgttccagatgaactgggtaatgcggtagtaaaacgccgcctgtcggagaaagactgcgaaaaaggctttattttggatggttatccgcgtaccgtggctcaagcggaatatctggatagttttcttgaatcccagaatcgccagttgacagccgccgtgctgttcaaagtccccgaagatgaagttgtgcaacgtttaacctctcgcctgatctgtccgaaatgcgggcgtatctacaacatgatttttctgccaccaaaagaagacgagctgtgtgacgattgcggtgtcggcttagtacagcgtgatgatgataaggaagaaacggtccgtcaccgcctgaaagtctaccttgagaagacccagccggtcattgactattatagtaagaaaggtattctcaaacgcgtagatgggtcgcaaggaatcgacaacgttgttgcagaagtcctggggattctgggttggagcgataag

SEQ ID NO: 758 - protein, 231 aa, synthetic construct
  REGION 1..231: note = Variant of adenylate kinase
MHHHHHHGGSGMGAYLVFLGPPGAGKGTQGRRIQEKTGIPHISTGDIFRCIVAKQNDELASKIKEIMEKGELVPDELGNAVVKRRLSEKDCEKGFILDGYPRTVAQAEYLDSFLESQNRQLTAAVLFKVPEDEVVQRLTSRLICPKCGRIYNMIFLPPKEDELCDDCGVGLVQRDDDKEETVRHRLKVYLEKTQPVIDYYSKKGILKRVDGSQGIDNVVAEVLGILGWSDK

SEQ ID NO: 759 - DNA, 693 bp, synthetic construct
  misc_feature 1..693: note = Variant of adenylate kinase
  source 1..693: mol_type = other DNA
atgcaccatcatcaccatcacgggggctccggcatgggggcatatctggtgttcttaggtccgccgggcgcgggaaaaggtacccaaggccgtcgcattcaggaaaagactggcatcccgcatattagcacgggcgatatcttccgtgacatcgtcgctaagcaaaacgatgaactggcctcgaaaattaaagaaatcatggagaaaggtgaactcgttccagatgaactgggtaatgcggtagtaaaacgccgcctgtcggagaaagactgcgaaaaaggctttattttggatggttatccgcgtaccgtggctcaagcggaatatctggatagttttcttgaatcccagaatcgccagttgacagccgccgtgctgttcaaagtccccgaagatgaagttgtgcaacgtgtgacctctcgcctgatctgtccgaaatgcgggcgtatctacaacatgatttttctgccaccaaaagaagacgagctgtgtgacgattgcggtgtcggcttagtacagcgtgatgatgataaggaagaaacggtccgtcaccgcctgaaagtctaccttgagaagacccagccggtcattgactattatagtaagaaaggtattctcaaacgcgtagatgggtcgcaaggaatcgacaacgttgttgcagaagtcctggggattctgggttggagcgataag

SEQ ID NO: 760 - protein, 231 aa, synthetic construct
  REGION 1..231: note = Variant of adenylate kinase
MHHHHHHGGSGMGAYLVFLGPPGAGKGTQGRRIQEKTGIPHISTGDIFRDIVAKQNDELASKIKEIMEKGELVPDELGNAVVKRRLSEKDCEKGFILDGYPRTVAQAEYLDSFLESQNRQLTAAVLFKVPEDEVVQRVTSRLICPKCGRIYNMIFLPPKEDELCDDCGVGLVQRDDDKEETVRHRLKVYLEKTQPVIDYYSKKGILKRVDGSQGIDNVVAEVLGILGWSDK

SEQ ID NO: 761 - DNA, 693 bp, synthetic construct
  misc_feature 1..693: note = Variant of adenylate kinase
  source 1..693: mol_type = other DNA
atgcaccatcatcaccatcacgggggctccggcatgggggcatatctggtgttcttaggtccgccgggcgcgggaaaaggtacccaaggccgtcgcattcaggaaaagactggcatcccgcatattagcacgggcgatatcttccgtgacatcgtcgctaagcaaaacgatgaactggcctcgaaaattaaagaaatcatggagaaaggtgaactcgttccagatgaactgggtaatgcggtagtaaaacgccgcctgtcggagaaagactgcgaaaaaggctttattttggatggttatccgcgtaccgtggctcaagcggaatatctggatagttttcttgaatcccagaatcgccagttgacagccgccgtgctgttcaaagtccccgaagatgaagttgtgcaacgtttaacctctcgcctgatctgtccgaaatgcgggcgtatctacaacatgatttttctgccaccaaaagaagacgagctgtgtgacgattgcggtgtcggcttagtacagcgtgatgatgataaggaagaaattgtccgtcaccgcctgaaagtctaccttgagaagacccagccggtcattgactattatagtaagaaaggtattctcaaacgcgtagatgggtcgcaaggaatcgacaacgttgttgcagaagtcctggggattctgggttggagcgataag

SEQ ID NO: 762 - protein, 231 aa, synthetic construct
  REGION 1..231: note = Variant of adenylate kinase
MHHHHHHGGSGMGAYLVFLGPPGAGKGTQGRRIQEKTGIPHISTGDIFRDIVAKQNDELASKIKEIMEKGELVPDELGNAVVKRRLSEKDCEKGFILDGYPRTVAQAEYLDSFLESQNRQLTAAVLFKVPEDEVVQRLTSRLICPKCGRIYNMIFLPPKEDELCDDCGVGLVQRDDDKEEIVRHRLKVYLEKTQPVIDYYSKKGILKRVDGSQGIDNVVAEVLGILGWSDK

SEQ ID NO: 763 - DNA, 693 bp, synthetic construct
  misc_feature 1..693: note = Variant of adenylate kinase
  source 1..693: mol_type = other DNA
atgcaccatcatcaccatcacgggggctccggcatgggggcatatctggtgttcttaggtccgccgggcgcgggaaaaggtacccaaggccgtcgcattcaggaaaagactggcatcccgcatattagcacgggcgatatcttccgtgacatcgtcgctaagcaaaacgatgaactggcctcgaaaattaaagaaatcatggagaaaggtgaactcgttccagatgaactgggtaatgcggtagtaaaacgccgcctgtcggagaaagactgcgaaaaaggctttattttggatggttatccgcgtaccgtggctcaagcggaatatctggatagttttcttgaatcccagaatcgccagttgacagccgccgtgctgttcaaagtccccgaagatgaagttgtgcaacgtttaacctctcgcctgatctgtccgaaatgcgggcgtatctacaacatgatttttctgccaccaaaagaagacgagctgtgtgacgattgcggtgtcggcttagtacagcgtgatgatgataaggaagaaacggtccgtcaccgcctgaaagtctaccttgagaagacccagccggtcattgactattatagtaagaaaggtattctcaaacgcgtagatgggtcgcaaactatcgacaacgttgttgcagaagtcctggggattctgggttggagcgataag

SEQ ID NO: 764 - protein, 231 aa, synthetic construct
  REGION 1..231: note = Variant of adenylate kinase
MHHHHHHGGSGMGAYLVFLGPPGAGKGTQGRRIQEKTGIPHISTGDIFRDIVAKQNDELASKIKEIMEKGELVPDELGNAVVKRRLSEKDCEKGFILDGYPRTVAQAEYLDSFLESQNRQLTAAVLFKVPEDEVVQRLTSRLICPKCGRIYNMIFLPPKEDELCDDCGVGLVQRDDDKEETVRHRLKVYLEKTQPVIDYYSKKGILKRVDGSQTIDNVVAEVLGILGWSDK

SEQ ID NO: 765 - DNA, 693 bp, synthetic construct
  misc_feature 1..693: note = Variant of adenylate kinase
  source 1..693: mol_type = other DNA
atgcaccatcatcaccatcacgggggctccggcatgggggcatatctggtgttcttaggtccgccgggcgcgggaaaaggtacccaaggccgtcgcattcaggaaaagactggcatcccgcatattagcacgggcgatatcttccgtgacatcgtcgctaagcaaaacgatgaactggcctcgaaaattaaagaaatcatggagaaaggtgaactcgttccagatgaactgggtaatgcggtagtaaaacgccgcctgtcggagaaagactgcgaaaaaggctttattttggatggttatccgcgtaccgtggctcaagcggaatatctggatagttttcttgaatcccagaatcgccagttgacagccgccgtgctgttcaaagtccccgaagatgaagttgtgcaacgtttactttctcgcctgatctgtccgaaatgcgggcgtatctacaacatgatttttctgccaccaaaagaagacgagctgtgtgacgattgcggtgtcggcttagtacagcgtgatgatgataaggaagaaacggtccgtcaccgcctgaaagtctaccttgagaagacccagccggtcattgactattatagtaagaaaggtattctcaaacgcgtagatgggtcgcaaggaatcgacaacgttgttgcagaagtcctggggattctgggttggagcgataag

SEQ ID NO: 766 - protein, 231 aa, synthetic construct
  REGION 1..231: note = Variant of adenylate kinase
MHHHHHHGGSGMGAYLVFLGPPGAGKGTQGRRIQEKTGIPHISTGDIFRDIVAKQNDELASKIKEIMEKGELVPDELGNAVVKRRLSEKDCEKGFILDGYPRTVAQAEYLDSFLESQNRQLTAAVLFKVPEDEVVQRLLSRLICPKCGRIYNMIFLPPKEDELCDDCGVGLVQRDDDKEETVRHRLKVYLEKTQPVIDYYSKKGILKRVDGSQGIDNVVAEVLGILGWSDK

SEQ ID NO: 767 - DNA, 693 bp, synthetic construct
  misc_feature 1..693: note = Variant of adenylate kinase
  source 1..693: mol_type = other DNA
atgcaccatcatcaccatcacgggggctccggcatgggggcatatctggtgttcttaggtccgccgggcgcgggaaaaggtacccaaggccgtcgcattcaggaaaagactggcatcccgcatattagcacgggcgatatcttccgtgacatcgtcgctaagcaaaacgatgaactggcctcgaaaattaaagaaatcatgacgaaaggtgaactcgttccagatgaactgggtaatgcggtagtaaaacgccgcctgtcggagaaagactgcgaaaaaggctttattttggatggttatccgcgtaccgtggctcaagcggaatatctggatagttttcttgaatcccagaatcgccagttgacagccgccgtgctgttcaaagtccccgaagatgaagttgtgcaacgtttaacctctcgcctgatctgtccgaaatgcgggcgtatctacaacatgatttttctgccaccaaaagaagacgagctgtgtgacgattgcggtgtcggcttagtacagcgtgatgatgataaggaagaaacggtccgtcaccgcctgaaagtctaccttgagaagacccagccggtcattgactattatagtaagaaaggtattctcaaacgcgtagatgggtcgcaaggaatcgacaacgttgttgcagaagtcctggggattctgggttggagcgataag

SEQ ID NO: 768 - protein, 231 aa, synthetic construct
  REGION 1..231: note = Variant of adenylate kinase
MHHHHHHGGSGMGAYLVFLGPPGAGKGTQGRRIQEKTGIPHISTGDIFRDIVAKQNDELASKIKEIMTKGELVPDELGNAVVKRRLSEKDCEKGFILDGYPRTVAQAEYLDSFLESQNRQLTAAVLFKVPEDEVVQRLTSRLICPKCGRIYNMIFLPPKEDELCDDCGVGLVQRDDDKEETVRHRLKVYLEKTQPVIDYYSKKGILKRVDGSQGIDNVVAEVLGILGWSDK

SEQ ID NO: 769 - DNA, 693 bp, synthetic construct
  misc_feature 1..693: note = Variant of adenylate kinase
  source 1..693: mol_type = other DNA
atgcaccatcatcaccatcacgggggctccggcatgggggcatatctggtgttcttaggtccgccgggcgcgggaaaaggtacccaaggccgtcgcattcaggaaaagactggcatcccgcatattagcacgggcgatatcttccgtgacatcgtcgctaagcaaaacgatgaactggcctcgaaaattaaagaaatcatggagaaaggtgaactcgttccagatgaactgggtaatgcggtagtaaaacgccgcctgtcggagaaagactgcgaaaaaggctttattttggatggttatccgcgtaccgtggctcaagcggaatatctggatagttttcttgaatcccagaatcgccagttgacagccgccgtgctgttcaaagtccccgaagatgaagttgtgcaacgtttaacctctcgcctgatctgtccgaaatgctcgcgtatctacaacatgatttttctgccaccaaaagaagacgagctgtgtgacgattgcggtgtcggcttagtacagcgtgatgatgataaggaagaaacggtccgtcaccgcctgaaagtctaccttgagaagacccagccggtcattgactattatagtaagaaaggtattctcaaacgcgtagatgggtcgcaaggaatcgacaacgttgttgcagaagtcctggggattctgggttggagcgataag

SEQ ID NO: 770 - protein, 231 aa, synthetic construct
  REGION 1..231: note = Variant of adenylate kinase
MHHHHHHGGSGMGAYLVFLGPPGAGKGTQGRRIQEKTGIPHISTGDIFRDIVAKQNDELASKIKEIMEKGELVPDELGNAVVKRRLSEKDCEKGFILDGYPRTVAQAEYLDSFLESQNRQLTAAVLFKVPEDEVVQRLTSRLICPKCSRIYNMIFLPPKEDELCDDCGVGLVQRDDDKEETVRHRLKVYLEKTQPVIDYYSKKGILKRVDGSQGIDNVVAEVLGILGWSDK

SEQ ID NO: 771 - DNA, 693 bp, synthetic construct
  misc_feature 1..693: note = Variant of adenylate kinase
  source 1..693: mol_type = other DNA
atgcaccatcatcaccatcacgggggctccggcatgggggcatatctggtgttcttaggtccgccgggcgcgggaaaaggtacccaaggccgtcgcattcaggaaaagactggcatcccgcatattagcacgggcgatatcttccgtgacatcgtcgctaagcaaaacgatgaactggcctcgaaaattaaagaaatcatggagaaaggtgaactcgttccagatgaactgggtaatgcggtagtaaaacgccgcctgtcggagaaagactgcgaaaaaggctttattttggatggttatccgcgtaccgtggctcaagcggaatatctggatagttttcttgaatcccagaatcgccagttgacagccgccgtgctgttcaaagtccccgaagatgaagttgtgcaacgtttaacctctcgcctgatctgtccgaaatgcgggcgtatctacaacatgatttttctgccaccaaaagaagacgagctgtgtgacgattgcggtgtcggcttacatcagcgtgatgatgataaggaagaaacggtccgtcaccgcctgaaagtctaccttgagaagacccagccggtcattgactattatagtaagaaaggtattctcaaacgcgtagatgggtcgcaaggaatcgacaacgttgttgcagaagtcctggggattctgggttggagcgataag

SEQ ID NO: 772 - protein, 231 aa, synthetic construct
  REGION 1..231: note = Variant of adenylate kinase
MHHHHHHGGSGMGAYLVFLGPPGAGKGTQGRRIQEKTGIPHISTGDIFRDIVAKQNDELASKIKEIMEKGELVPDELGNAVVKRRLSEKDCEKGFILDGYPRTVAQAEYLDSFLESQNRQLTAAVLFKVPEDEVVQRLTSRLICPKCGRIYNMIFLPPKEDELCDDCGVGLHQRDDDKEETVRHRLKVYLEKTQPVIDYYSKKGILKRVDGSQGIDNVVAEVLGILGWSDK

SEQ ID NO: 773 - DNA, 693 bp, synthetic construct
  misc_feature 1..693: note = Variant of adenylate kinase
  source 1..693: mol_type = other DNA
atgcaccatcatcaccatcacgggggctccggcatgggggcatatctggtgttcttaggtccgccgggcgcgggaaaaggtacccaaggccgtcgcattcaggaaaagactggcatcccgcatattagcacgggcgatatcttccgtgacatcgtcgctaagcaaaacgatgaactggcctcgaaaattaaagaaatcatggagaaaggtgaactcgttccagatgaactgggtaatgcggtagtaaaacgccgcctgtcggagaaagactgcgaaaaaggctttattttggatggttatccgcgtaccgtggctcaagcggaatatctggatagttttcttgaatcccagaatcgccagttgacagccgccgtgctgttcaaagtccccgaagatgaagttgtgcaacgtattacctctcgcctgatctgtccgaaatgcgggcgtatctacaacatgatttttctgccaccaaaagaagacgagctgtgtgacgattgcggtgtcggcttagtacagcgtgatgatgataaggaagaaacggtccgtcaccgcctgaaagtctaccttgagaagacccagccggtcattgactattatagtaagaaaggtattctcaaacgcgtagatgggtcgcaaggaatcgacaacgttgttgcagaagtcctggggattctgggttggagcgataag

SEQ ID NO: 774 - protein, 231 aa, synthetic construct
  REGION 1..231: note = Variant of adenylate kinase
MHHHHHHGGSGMGAYLVFLGPPGAGKGTQGRRIQEKTGIPHISTGDIFRDIVAKQNDELASKIKEIMEKGELVPDELGNAVVKRRLSEKDCEKGFILDGYPRTVAQAEYLDSFLESQNRQLTAAVLFKVPEDEVVQRITSRLICPKCGRIYNMIFLPPKEDELCDDCGVGLVQRDDDKEETVRHRLKVYLEKTQPVIDYYSKKGILKRVDGSQGIDNVVAEVLGILGWSDK

SEQ ID NO: 775 - DNA, 693 bp, synthetic construct
  misc_feature 1..693: note = Variant of adenylate kinase
  source 1..693: mol_type = other DNA
atgcaccatcatcaccatcacgggggctccggcatgggggcatatctggtgttcttaggtccgccgggcgcgggaaaaggtacccaaggccgtcgcattcaggaaaagactggcatcccgcatattagcacgggcgatatcttccgtgacatcgtcgctaagcaaaacgatgaactggcctcgaaaattaaagaaatcatggagttgggtgaactcgttccagatgaactgggtaatgcggtagtaaaacgccgcctgtcggagaaagactgcgaaaaaggctttattttggatggttatccgcgtaccgtggctcaagcggaatatctggatagttttcttgaatcccagaatcgccagttgacagccgccgtgctgttcaaagtccccgaagatgaagttgtgcaacgtttaacctctcgcctgatctgtccgaaatgcgggcgtatctacaacatgatttttctgccaccaaaagaagacgagctgtgtgacgattgcggtgtcggcttagtacagcgtgatgatgataaggaagaaacggtccgtcaccgcctgaaagtctaccttgagaagacccagccggtcattgactattatagtaagaaaggtattctcaaacgcgtagatgggtcgcaaggaatcgacaacgttgttgcagaagtcctggggattctgggttggagcgataag

SEQ ID NO: 776 - protein, 231 aa, synthetic construct
  REGION 1..231: note = Variant of adenylate kinase
MHHHHHHGGSGMGAYLVFLGPPGAGKGTQGRRIQEKTGIPHISTGDIFRDIVAKQNDELASKIKEIMELGELVPDELGNAVVKRRLSEKDCEKGFILDGYPRTVAQAEYLDSFLESQNRQLTAAVLFKVPEDEVVQRLTSRLICPKCGRIYNMIFLPPKEDELCDDCGVGLVQRDDDKEETVRHRLKVYLEKTQPVIDYYSKKGILKRVDGSQGIDNVVAEVLGILGWSDK

SEQ ID NO: 777 - DNA, 693 bp, synthetic construct
  misc_feature 1..693: note = Variant of adenylate kinase
  source 1..693: mol_type = other DNA
atgcaccatcatcaccatcacgggggctccggcatgggggcatatctggtgttcttaggtccgccgggcgcgggaaaaggtacccaaggccgtcgcattcaggaaaagactggcatcccgcatattagcacgggcgatatcttccgtgacatcgtcgctaagcaaaacgatgaactggcctcgaaaattaaagaaatcatggagaaaggtgaactcgttccagatgaactgggtaatgcgcaggtaaaacgccgcctgtcggagaaagactgcgaaaaaggctttattttggatggttatccgcgtaccgtggctcaagcggaatatctggatagttttcttgaatcccagaatcgccagttgacagccgccgtgctgttcaaagtccccgaagatgaagttgtgcaacgtttaacctctcgcctgatctgtccgaaatgcgggcgtatctacaacatgatttttctgccaccaaaagaagacgagctgtgtgacgattgcggtgtcggcttagtacagcgtgatgatgataaggaagaaacggtccgtcaccgcctgaaagtctaccttgagaagacccagccggtcattgactattatagtaagaaaggtattctcaaacgcgtagatgggtcgcaaggaatcgacaacgttgttgcagaagtcctggggattctgggttggagcgataag

SEQ ID NO: 778 - protein, 231 aa, synthetic construct
  REGION 1..231: note = Variant of adenylate kinase
MHHHHHHGGSGMGAYLVFLGPPGAGKGTQGRRIQEKTGIPHISTGDIFRDIVAKQNDELASKIKEIMEKGELVPDELGNAQVKRRLSEKDCEKGFILDGYPRTVAQAEYLDSFLESQNRQLTAAVLFKVPEDEVVQRLTSRLICPKCGRIYNMIFLPPKEDELCDDCGVGLVQRDDDKEETVRHRLKVYLEKTQPVIDYYSKKGILKRVDGSQGIDNVVAEVLGILGWSDK

SEQ ID NO: 779 - DNA, 693 bp, synthetic construct
  misc_feature 1..693: note = Variant of adenylate kinase
  source 1..693: mol_type = other DNA
atgcaccatcatcaccatcacgggggctccggcatgggggcatatctggtgttcttaggtccgccgggcgcgggaaaaggtacccaaggccgtcgcattcaggaaaagactggcatcccgcatattagcacgggcgatatcttccgtgacatcgtcgctaagcaaaacgatgaactggcctcgaaaattaaagaaatcatggagaaaggtgaactcgttccagatgaactgggtaatgcggtagtaaaacgccgcctgtcggagaaagactgcgaaaaaggctttattttggatggttatccgcgtaccgtggctcaagcggaatatctggatagttttcttgaatcccagaatcgccagttgacagccgccgtgctgttcaaagtccccgaagatgaagttgtgcaacgtttaacctctcgcctgatctgtccgaaatgcgggcgtatctacaacatgaggtttctgccaccaaaagaagacgagctgtgtgacgattgcggtgtcggcttagtacagcgtgatgatgataaggaagaaacggtccgtcaccgcctgaaagtctaccttgagaagacccagccggtcattgactattatagtaagaaaggtattctcaaacgcgtagatgggtcgcaaggaatcgacaacgttgttgcagaagtcctggggattctgggttggagcgataag

SEQ ID NO: 780 - protein, 231 aa, synthetic construct
  REGION 1..231: note = Variant of adenylate kinase
MHHHHHHGGSGMGAYLVFLGPPGAGKGTQGRRIQEKTGIPHISTGDIFRDIVAKQNDELASKIKEIMEKGELVPDELGNAVVKRRLSEKDCEKGFILDGYPRTVAQAEYLDSFLESQNRQLTAAVLFKVPEDEVVQRLTSRLICPKCGRIYNMRFLPPKEDELCDDCGVGLVQRDDDKEETVRHRLKVYLEKTQPVIDYYSKKGILKRVDGSQGIDNVVAEVLGILGWSDK

SEQ ID NO: 781 - DNA, 693 bp, synthetic construct
  misc_feature 1..693: note = Variant of adenylate kinase
  source 1..693: mol_type = other DNA
atgcaccatcatcaccatcacgggggctccggcatgggggcatatctggtgttcttaggtccgccgggcgcgggaaaaggtacccaaggccgtcgcatttcggcaaagactggcatcccgcatattagcacgggcgatatcttccgtgacatcgtcgctaagcaaaacgatgaactggcctcgaaaattaaagagatcatggagaaaggtgaactcgttccagatgaactgggtaatgcgattgtaaaacgccgcctgtcggagaaagactgcgaaaaaggctttattttggatggttatccgcgtaccgtgcgccaagcggaatatctggatagttttcttgaaagccagaatcgccagttgacagccgccgtgctgttcaaagtccccgaagatgaagttgtgcaacgtttaacctctcgcctgatctgtccgaaatgcacgcgtatctacaacatgatttttctgccaccaaaagaagacgagctgtgtgacgattgcggtgtcggcttagtacagcgtgatgatgataaggaagaaacggtccgtcaccgcctgaaagtctaccttgagaagacccagccggtcattgactattatagtaagaaaggtattctcaaacgcgtagatgggtcgcaaggaatcgacaacgttctggcagaagtcctggggattctgggttggagcgataag

SEQ ID NO: 782 - protein, 231 aa, synthetic construct
  REGION 1..231: note = Variant of adenylate kinase
MHHHHHHGGSGMGAYLVFLGPPGAGKGTQGRRISAKTGIPHISTGDIFRDIVAKQNDELASKIKEIMEKGELVPDELGNAIVKRRLSEKDCEKGFILDGYPRTVRQAEYLDSFLESQNRQLTAAVLFKVPEDEVVQRLTSRLICPKCTRIYNMIFLPPKEDELCDDCGVGLVQRDDDKEETVRHRLKVYLEKTQPVIDYYSKKGILKRVDGSQGIDNVLAEVLGILGWSDK

SEQ ID NO: 783 - DNA, 693 bp, synthetic construct
  misc_feature 1..693: note = Variant of adenylate kinase
  source 1..693: mol_type = other DNA
atgcaccatcatcaccatcacgggggctccggcatgggggcatatctggtgttcttaggtccgccgggcgcgggaaaaggtacccaaggccgtcgcatttcggcaaagactggcatcccgcatattagcacgggcgatatcttccgtgacatcgtcgctaagcaaaacgatgaactggcctcgaaaattaaagagatcatggcgaaaggtgaactcgttccagatgaactgggtaatgcggttgtaaaacgccgcctgtcggagaaagactgcgaaaaaggctttattttggatggttatccgcgtaccgtgcgccaagcggaatatctggatagttttcttgaaagccagaatcgccagttgacagccgccgtgctgttcaaagtccccgaagatgaagttgtgcaacgtttaacctctcgcctgatctgtccgaaatgccaccgtatctacaacatgatttttctgccaccaaaagaagacgagctgtgtgacgattgcggtgtcggcttagtacagcgtgatgatgataaggaagaaacggtccgtcaccgcctgaaagtctaccttgagaagacccagccggtcattgactattatagtaagaaaggtattctcaaacgcgtagatgggtcgcaaggaatcgacaacgttctggcagaagtcctggggattctgggttggagcgataag

SEQ ID NO: 784 - protein, 231 aa, synthetic construct
  REGION 1..231: note = Variant of adenylate kinase
MHHHHHHGGSGMGAYLVFLGPPGAGKGTQGRRISAKTGIPHISTGDIFRDIVAKQNDELASKIKEIMAKGELVPDELGNAVVKRRLSEKDCEKGFILDGYPRTVRQAEYLDSFLESQNRQLTAAVLFKVPEDEVVQRLTSRLICPKCHRIYNMIFLPPKEDELCDDCGVGLVQRDDDKEETVRHRLKVYLEKTQPVIDYYSKKGILKRVDGSQGIDNVLAEVLGILGWSDK

SEQ ID NO: 785 - DNA, 693 bp, synthetic construct
  misc_feature 1..693: note = Variant of adenylate kinase
  source 1..693: mol_type = other DNA
atgcaccatcatcaccatcacgggggctccggcatgggggcatatctggtgttcttaggtccgccgggcgcgggaaaaggtacccaaggccgtcgcatttcggcaaagactggcatcccgcatattagcacgggcgatatcttccgtgacatcgtcgctaagcaaaacgatgaactggcctcgaaaattaaagagatcatggcgaaaggtgaactcgttccagatgaactgggtaatgcgattgtaaaacgccgcctgtcggagaaagactgcgaaaaaggctttattttggatggttatccgcgtaccgtgcgccaagcggaatatctggatagttttcttgaaagccagaatcgccagttgacagccgccgtgctgttcaaagtccccgaagatgaagttgtgcaacgtttaacctctcgcctgatctgtccgaaatgcgggcgtatctacaacatgatttttctgccaccaaaagaagacgagctgtgtgacgattgcggtgtcggcttagtacagcgtgatgatgataaggaagaaacggtccgtcaccgcctgaaagtctaccttgagaagacccagccggtcattgactattatagtaagaaaggtattctcaaacgcgtagatgggtcgcaaggaatcgacaacgttctggcagaagtcctggggattctgggttggagcgataag

SEQ ID NO: 786 - protein, 231 aa, synthetic construct
  REGION 1..231: note = Variant of adenylate kinase
MHHHHHHGGSGMGAYLVFLGPPGAGKGTQGRRISAKTGIPHISTGDIFRDIVAKQNDELASKIKEIMAKGELVPDELGNAIVKRRLSEKDCEKGFILDGYPRTVRQAEYLDSFLESQNRQLTAAVLFKVPEDEVVQRLTSRLICPKCGRIYNMIFLPPKEDELCDDCGVGLVQRDDDKEETVRHRLKVYLEKTQPVIDYYSKKGILKRVDGSQGIDNVLAEVLGILGWSDK

SEQ ID NO: 787 - DNA, 693 bp, synthetic construct
  misc_feature 1..693: note = Variant of adenylate kinase
  source 1..693: mol_type = other DNA
atgcaccatcatcaccatcacgggggctccggcatgggggcatatctggtgttcttaggtccgccgggcgcgggaaaaggtacccaaggccgtcgcatttcggcaaagactggcatcccgcatattagcacgggcgatatcttccgtgacatcgtcgctaagcaaaacgatgaactggcctcgaaaattaaagagatcatggagaaaggtgaactcgttccagatgaactgggtaatgcggtagtaaaacgccgcctgtcggagaaagactgcgaaaaaggctttattttggatggttatccgcgtaccgtgcgccaagcggaatatctggatagttttcttgaaagccagaatcgccagttgacagccgccgtgctgttcaaagtccccgaagatgaagttgtgcaacgtttaacctctcgcctgatctgtccgaaatgccaccgtatctacaacatgatttttctgccaccaaaagaagacgagctgtgtgacgattgcggtgtcggcttagtacagcgtgatgatgataaggaagaaacggtccgtcaccgcctgaaagtctaccttgagaagacccagccggtcattgactattatagtaagaaaggtattctcaaacgcgtagatgggtcgcaaggaatcgacaacgttttcgcagaagtcctggggattctgggttggagcgataag

SEQ ID NO: 788 - protein, 231 aa, synthetic construct
  REGION 1..231: note = Variant of adenylate kinase
MHHHHHHGGSGMGAYLVFLGPPGAGKGTQGRRISAKTGIPHISTGDIFRDIVAKQNDELASKIKEIMEKGELVPDELGNAVVKRRLSEKDCEKGFILDGYPRTVRQAEYLDSFLESQNRQLTAAVLFKVPEDEVVQRLTSRLICPKCHRIYNMIFLPPKEDELCDDCGVGLVQRDDDKEETVRHRLKVYLEKTQPVIDYYSKKGILKRVDGSQGIDNVFAEVLGILGWSDK

SEQ ID NO: 789 - DNA, 693 bp, synthetic construct
  misc_feature 1..693: note = Variant of adenylate kinase
  source 1..693: mol_type = other DNA
atgcaccatcatcaccatcacgggggctccggcatgggggcatatctggtgttcttaggtccgccgggcgcgggaaaaggtacccaaggccgtcgcatttcggcaaagactggcatcccgcatattagcacgggcgatatcttccgtgacatcgtcgctaagcaaaacgatgaactggcctcgaaaattaaagagatcatggcgaaaggtgaactcgttccagatgaactgggtaatgcggtagtaaaacgccgcctgtcggagaaagactgcgaaaaaggctttattttggatggttatccgcgtaccgtgcgccaagcggaatatctggatagttttcttgaaagccagaatcgccagttgacagccgccgtgctgttcaaagtccccgaagatgaagttgtgcaacgtttaacctctcgcctgatctgtccgaaatgcacgcgtatctacaacatgatttttctgccaccaaaagaagacgagctgtgtgacgattgcggtgtcggcttagtacagcgtgatgatgataaggaagaaacggtccgtcaccgcctgaaagtctaccttgagaagacccagccggtcattgactattatagtaagaaaggtattctcaaacgcgtagatgggtcgcaaggaatcgacaacgttctggcagaagtcctggggattctgggttggagcgataag

SEQ ID NO: 790 - protein, 231 aa, synthetic construct
  REGION 1..231: note = Variant of adenylate kinase
MHHHHHHGGSGMGAYLVFLGPPGAGKGTQGRRISAKTGIPHISTGDIFRDIVAKQNDELASKIKEIMAKGELVPDELGNAVVKRRLSEKDCEKGFILDGYPRTVRQAEYLDSFLESQNRQLTAAVLFKVPEDEVVQRLTSRLICPKCTRIYNMIFLPPKEDELCDDCGVGLVQRDDDKEETVRHRLKVYLEKTQPVIDYYSKKGILKRVDGSQGIDNVLAEVLGILGWSDK

SEQ ID NO: 791 - DNA, 693 bp, synthetic construct
  misc_feature 1..693: note = Variant of adenylate kinase
  source 1..693: mol_type = other DNA
atgcaccatcatcaccatcacgggggctccggcatgggggcatatctggtgttcttaggtccgccgggcgcgggaaaaggtacccaaggccgtcgcatttcggcaaagactggcatcccgcatattagcacgggcgatatcttccgtgacatcgtcgctaagcaaaacgatgaactggcctcgaaaattaaagagatcatggagaaaggtgaactcgttccagatgaactgggtaatgcgattgtaaaacgccgcctgtcggagaaagactgcgaaaaaggctttattttggatggttatccgcgtaccgtgcgccaagcggaatatctggatagttttcttgaaagccagaatcgccagttgacagccgccgtgctgttcaaagtccccgaagatgaagttgtgcaacgtttaacctctcgcctgatctgtccgaaatgcgggcgtatctacaacatgatttttctgccaccaaaagaagacgagctgtgtgacgattgcggtgtcggcttagtacagcgtgatgatgataaggaagaaacggtccgtcaccgcctgaaagtctaccttgagaagacccagccggtcattgactattatagtaagaaaggtattctcaaacgcgtagatgggtcgcaaggaatcgacaacgttctggcagaagtcctggggattctgggttggagcgataag

SEQ ID NO: 792 - protein, 231 aa, synthetic construct
  REGION 1..231: note = Variant of adenylate kinase
MHHHHHHGGSGMGAYLVFLGPPGAGKGTQGRRISAKTGIPHISTGDIFRDIVAKQNDELASKIKEIMEKGELVPDELGNAIVKRRLSEKDCEKGFILDGYPRTVRQAEYLDSFLESQNRQLTAAVLFKVPEDEVVQRLTSRLICPKCGRIYNMIFLPPKEDELCDDCGVGLVQRDDDKEETVRHRLKVYLEKTQPVIDYYSKKGILKRVDGSQGIDNVLAEVLGILGWSDK

SEQ ID NO: 793 - DNA, 693 bp, synthetic construct
  misc_feature 1..693: note = Variant of adenylate kinase
  source 1..693: mol_type = other DNA
atgcaccatcatcaccatcacgggggctccggcatgggggcatatctggtgttcttaggtccgccgggcgcgggaaaaggtacccaaggccgtcgcatttcggcaaagactggcatcccgcatattagcacgggcgatatcttccgtgacatcgtcgctaagcaaaacgatgaactggcctcgaaaattaaagagatcatggagaaaggtgaactcgttccagatgaactgggtaatgcggtagtaaaacgccgcctgtcggagaaagactgcgaaaaaggctttattttggatggttatccgcgtaccgtgcgccaagcggaatatctggatagttttcttgaaagccagaatcgccagttgacagccgccgtgctgttcaaagtccccgaagatgaagttgttctgcgtgtgctgtctcgcctgatctgtccgaaatgcgggcgtatctacaacatgatttttctgccaccaaaagaagacgagctgtgtgacgattgcggtgtcggcttagtacagcgtgatgatgataaggaagaaacggtccgtcaccgcctgaaagtctaccttgagaagacccagccggtcattgactattatagtaagaaaggtattctcaaacgcgtagatgggtcgcaaggaatcgacaacgttgttgcagaagtcctggggattctgggttggagcgataag

SEQ ID NO: 794 - protein, 231 aa, synthetic construct
  REGION 1..231: note = Variant of adenylate kinase
MHHHHHHGGSGMGAYLVFLGPPGAGKGTQGRRISAKTGIPHISTGDIFRDIVAKQNDELASKIKEIMEKGELVPDELGNAVVKRRLSEKDCEKGFILDGYPRTVRQAEYLDSFLESQNRQLTAAVLFKVPEDEVVLRVLSRLICPKCGRIYNMIFLPPKEDELCDDCGVGLVQRDDDKEETVRHRLKVYLEKTQPVIDYYSKKGILKRVDGSQGIDNVVAEVLGILGWSDK

SEQ ID NO: 795 - DNA, 693 bp, synthetic construct
  misc_feature 1..693: note = Variant of adenylate kinase
  source 1..693: mol_type = other DNA
atgcaccatcatcaccatcacgggggctccggcatgggggcatatctggtgttcttaggtccgccgggcgcgggaaaaggtacccaaggccgtcgcatttcggcaaagactggcatcccgcatattagcacgggcgatatcttccgtgacatcgtcgctaagcaaaacgatgaactggcctcgaaaattaaagagatcatggagaaaggtgaactcgttccagatgaactgggtaatgcggtagtaaaacgccgcctgtcggagaaagactgcgaaaaaggctttattttggatggttatccgcgtaccgtgcgccaagcggaatatctggatagttttcttgaaagccagaatcgccagttgacagccgccgtgctgttcaaagtccccgaagatgaagttgtgcaacgtttaacctctcgcctgatctgtccgaaatgcacgcgtatctacaacatgatttttctgccaccaaaagaagacgagctgtgtgacgattgcggtgtcggcttagtacagcgtgatgatgataaggaagaaacggtccgtcaccgcctgaaagtctaccttgagaagacccagccggtcattgactattatagtaagaaaggtattctcaaacgcgtagatgggtcgcaaggaatcgacaacgttttcgcagaagtcctggggattctgggttggagcgataag

SEQ ID NO: 796 - protein, 231 aa, synthetic construct
  REGION 1..231: note = Variant of adenylate kinase
MHHHHHHGGSGMGAYLVFLGPPGAGKGTQGRRISAKTGIPHISTGDIFRDIVAKQNDELASKIKEIMEKGELVPDELGNAVVKRRLSEKDCEKGFILDGYPRTVRQAEYLDSFLESQNRQLTAAVLFKVPEDEVVQRLTSRLICPKCTRIYNMIFLPPKEDELCDDCGVGLVQRDDDKEETVRHRLKVYLEKTQPVIDYYSKKGILKRVDGSQGIDNVFAEVLGILGWSDK

SEQ ID NO: 797 - DNA, 693 bp, synthetic construct
  misc_feature 1..693: note = Variant of adenylate kinase
  source 1..693: mol_type = other DNA
atgcaccatcatcaccatcacgggggctccggcatgggggcatatctggtgttcttaggtccgccgggcgcgggaaaaggtacccaaggccgtcgcatttcggcaaagactggcatcccgcatattagcacgggcgatatcttccgtgacatcgtcgctaagcaaaacgatgaactggcctcgaaaattaaagagatcatggagaaaggtgaactcgttccagatgaactgggtaatgcggtagtaaaacgccgcctgtcggagaaagactgcgaaaaaggctttattttggatggttatccgcgtaccgtgcgccaagcggaatatctggatagttttcttgaaagccagaatcgccagttgacagccgccgtgctgttcaaagtccccgaagatgaagttgtgcaacgtttaacctctcgcctgatctgtccgaaatgccaccgtatctacaacatgatttttctgccaccaaaagaagacgagctgtgtgacgattgcggtgtcggcttagtacagcgtgatgatgataaggaagaaacggtccgtcaccgcctgaaagtctaccttgagaagacccagccggtcattgactattatagtaagaaaggtattctcaaacgcgtagatgggtcgcaaggaatcgacaacgttctggcagaagtcctggggattctgggttggagcgataag

SEQ ID NO: 798 - protein, 231 aa, synthetic construct
  REGION 1..231: note = Variant of adenylate kinase
MHHHHHHGGSGMGAYLVFLGPPGAGKGTQGRRISAKTGIPHISTGDIFRDIVAKQNDELASKIKEIMEKGELVPDELGNAVVKRRLSEKDCEKGFILDGYPRTVRQAEYLDSFLESQNRQLTAAVLFKVPEDEVVQRLTSRLICPKCHRIYNMIFLPPKEDELCDDCGVGLVQRDDDKEETVRHRLKVYLEKTQPVIDYYSKKGILKRVDGSQGIDNVLAEVLGILGWSDK

SEQ ID NO: 799 - DNA, 693 bp, synthetic construct
  misc_feature 1..693: note = Variant of adenylate kinase
  source 1..693: mol_type = other DNA
atgcaccatcatcaccatcacgggggctccggcatgggggcatatctggtgttcttaggtccgccgggcgcgggaaaaggtacccaaggccgtcgcatttcggcaaagactggcatcccgcatattagcacgggcgatatcttccgtgacatcgtcgctaagcaaaacgatgaactggcctcgaaaattaaagagatcatggcgaaaggtgaactcgttccagatgaactgggtaatgcggtagtaaaacgccgcctgtcggagaaagactgcgaaaaaggctttattttggatggttatccgcgtaccgtgcgccaagcggaatatctggatagttttcttgaaagccagaatcgccagttgacagccgccgtgctgttcaaagtccccgaagatgaagttgtgcaacgtttaacctctcgcctgatctgtccgaaatgcgggcgtatctacaacatgatttttctgccaccaaaagaagacgagctgtgtgacgattgcggtgtcggcttagtacagcgtgatgatgataaggaagaaacggtccgtcaccgcctgaaagtctaccttgagaagacccagccggtcattgactattatagtaagaaaggtattctcaaacgcgtagatgggtcgcaaggaatcgacaacgttctggcagaagtcctggggattctgggttggagcgataag

SEQ ID NO: 800 - protein, 231 aa, synthetic construct
  REGION 1..231: note = Variant of adenylate kinase
MHHHHHHGGSGMGAYLVFLGPPGAGKGTQGRRISAKTGIPHISTGDIFRDIVAKQNDELASKIKEIMAKGELVPDELGNAVVKRRLSEKDCEKGFILDGYPRTVRQAEYLDSFLESQNRQLTAAVLFKVPEDEVVQRLTSRLICPKCGRIYNMIFLPPKEDELCDDCGVGLVQRDDDKEETVRHRLKVYLEKTQPVIDYYSKKGILKRVDGSQGIDNVLAEVLGILGWSDK

SEQ ID NO: 801 - DNA, 693 bp, synthetic construct
  misc_feature 1..693: note = Variant of adenylate kinase
  source 1..693: mol_type = other DNA
atgcaccatcatcaccatcacgggggctccggcatgggggcatatctggtgttcttaggtccgccgggcgcgggaaaaggtacccaaggccgtcgcatttcggcaaagactggcatcccgcatattagcacgggcgatatcttccgtgacatcgtcgctaagcaaaacgatgaactggcctcgaaaattaaagagaccatggcgaaaggtgaactcgttccagatgaactgggtaatgcggttgtaaaacgccgcctgtcggagaaagactgcgaaaaaggctttattttggatggttatccgcgtaccgtgcgccaagcggaatatctggatagttttcttgaaagccagaatcgccagttgacagccgccgtgctgttcaaagtccccgaagatgaagttgtgcaacgtttaacctctcgcctgatctgtccgaaatgcgggcgtatctacaacatgatttttctgccaccaaaagaagacgagctgtgtgacgattgcggtgtcggcttagtacagcgtgatgatgataaggaagaaacggtccgtcaccgcctgaaagtctaccttgagaagacccagccggtcattgactattatagtaagaaaggtattctcaaacgcgtagatgggtcgcaaggaatcgacaacgttctggcagaagtcctggggattctgggttggagcgataag

SEQ ID NO: 802 - protein, 231 aa, synthetic construct
  REGION 1..231: note = Variant of adenylate kinase
MHHHHHHGGSGMGAYLVFLGPPGAGKGTQGRRISAKTGIPHISTGDIFRDIVAKQNDELASKIKETMAKGELVPDELGNAVVKRRLSEKDCEKGFILDGYPRTVRQAEYLDSFLESQNRQLTAAVLFKVPEDEVVQRLTSRLICPKCGRIYNMIFLPPKEDELCDDCGVGLVQRDDDKEETVRHRLKVYLEKTQPVIDYYSKKGILKRVDGSQGIDNVLAEVLGILGWSDK

SEQ ID NO: 803 - DNA, 693 bp, synthetic construct
  misc_feature 1..693: note = Variant of adenylate kinase
  source 1..693: mol_type = other DNA
atgcaccatcatcaccatcacgggggctccggcatgggggcatatctggtgttcttaggtccgccgggcgcgggaaaaggtacccaaggccgtcgcatttcggcaaagactggcatcccgcatattagcacgggcgatatcttccgtgacatcgtcgctaagcaaaacgatgaactggcctcgaaaattaaagagcaaatggagaaaggtgaactcgttccagatgaactgggtaatgcggtagtaaaacgccgcctgtcggagaaagactgcgaaaaaggctttattttggatggttatccgcgtaccgtgcgccaagcggaatatctggatagttttcttgaaagccagaatcgccagttgacagccgccgtgctgttcaaagtccccgaagatgaagttgtgcaacgtttaacctctcgcctgatctgtccgaaatgccaccgtatctacaacatgatttttctgccaccaaaagaagacgagctgtgtgacgattgcggtgtcggcttagtacagcgtgatgatgataaggaagaaacggtccgtcaccgcctgaaagtctaccttgagaagacccagccggtcattgactattatagtaagaaaggtattctcaaacgcgtagatgggtcgcaaggaatcgacaacgttttcgcagaagtcctggggattctgggttggagcgataag

SEQ ID NO: 804 - protein, 231 aa, synthetic construct
  REGION 1..231: note = Variant of adenylate kinase
MHHHHHHGGSGMGAYLVFLGPPGAGKGTQGRRISAKTGIPHISTGDIFRDIVAKQNDELASKIKEQMEKGELVPDELGNAVVKRRLSEKDCEKGFILDGYPRTVRQAEYLDSFLESQNRQLTAAVLFKVPEDEVVQRLTSRLICPKCHRIYNMIFLPPKEDELCDDCGVGLVQRDDDKEETVRHRLKVYLEKTQPVIDYYSKKGILKRVDGSQGIDNVFAEVLGILGWSDK

SEQ ID NO: 805 - DNA, 693 bp, synthetic construct
  misc_feature 1..693: note = Variant of adenylate kinase
  source 1..693: mol_type = other DNA
atgcaccatcatcaccatcacgggggctccggcatgggggcatatctggtgttcttaggtccgccgggcgcgggaaaaggtacccaaggccgtcgcatttcggcaaagactggcatcccgcatattagcacgggcgatatcttccgtgacatcgtcgctaagcaaaacgatgaactggcctcgaaaattaaagagatcatggagaaaggtgaactcgttccagatgaactgggtaatgcggtagtaaaacgccgcctgtcggagaaagactgcgaaaaaggctttattttggatggttatccgcgtaccgtgcgccaagcggaatatctggatagttttcttgaaagccagaatcgccagttgacagccgccgtgctgttcaaagtccccgaagatgaagttgtgcaacgtttaacctctcgcctgatctgtccgaaatgcacgcgtatctacaacatgatttttctgccaccaaaagaagacgagctgtgtgacgattgcggtgtcggcttagtacagcgtgatgatgataaggaagaaacggtccgtcaccgcctgaaagtctaccttgagaagacccagccggtcattgactattatagtaagaaaggtattctcaaacgcgtagatgggtcgcaaggaatcgacaacgttctggcagaagtcctggggattctgggttggagcgataag

SEQ ID NO: 806 - protein, 231 aa, synthetic construct
  REGION 1..231: note = Variant of adenylate kinase
MHHHHHHGGSGMGAYLVFLGPPGAGKGTQGRRISAKTGIPHISTGDIFRDIVAKQNDELASKIKEIMEKGELVPDELGNAVVKRRLSEKDCEKGFILDGYPRTVRQAEYLDSFLESQNRQLTAAVLFKVPEDEVVQRLTSRLICPKCTRIYNMIFLPPKEDELCDDCGVGLVQRDDDKEETVRHRLKVYLEKTQPVIDYYSKKGILKRVDGSQGIDNVLAEVLGILGWSDK

SEQ ID NO: 807 - DNA, 693 bp, synthetic construct
  misc_feature 1..693: note = Variant of adenylate kinase
  source 1..693: mol_type = other DNA
atgcaccatcatcaccatcacgggggctccggcatgggggcatatctggtgttcttaggtccgccgggcgcgggaaaaggtacccaaggccgtcgcatttcggcaaagactggcatcccgcatattagcacgggcgatatcttccgtgacatcgtcgctaagcaaaacgatgaactggcctcgaaaattaaagagaccatggcgaaaggtgaactcgttccagatgaactgggtaatgcggttgtaaaacgccgcctgtcggagaaagactgcgaaaaaggctttattttggatggttatccgcgtaccgtgcgccaagcggaatatctggatagttttcttgaaagccagaatcgccagttgacagccgccgtgctgttcaaagtccccgaagatgaagttgtgcaacgtttaacctctcgcctgatctgtccgaaatgccaccgtatctacaacatgatttttctgccaccaaaagaagacgagctgtgtgacgattgcggtgtcggcttagtacagcgtgatgatgataaggaagaaacggtccgtcaccgcctgaaagtctaccttgagaagacccagccggtcattgactattatagtaagaaaggtattctcaaacgcgtagatgggtcgcaaggaatcgacaacgttgttgcagaagtcctggggattctgggttggagcgataag

SEQ ID NO: 808 - protein, 231 aa, synthetic construct
  REGION 1..231: note = Variant of adenylate kinase
MHHHHHHGGSGMGAYLVFLGPPGAGKGTQGRRISAKTGIPHISTGDIFRDIVAKQNDELASKIKETMAKGELVPDELGNAVVKRRLSEKDCEKGFILDGYPRTVRQAEYLDSFLESQNRQLTAAVLFKVPEDEVVQRLTSRLICPKCHRIYNMIFLPPKEDELCDDCGVGLVQRDDDKEETVRHRLKVYLEKTQPVIDYYSKKGILKRVDGSQGIDNVVAEVLGILGWSDK

SEQ ID NO: 809 - DNA, 693 bp, synthetic construct
  misc_feature 1..693: note = Variant of adenylate kinase
  source 1..693: mol_type = other DNA
atgcaccatcatcaccatcacgggggctccggcatgggggcatatctggtgttcctgggtccgccgggcgcgggaaaaggtacccaaggccgtcgcatttcggcaaagactggcatcccgcatattagcacgggcgatatcttccgtgacatcgtcgctaagcaaaacgatgaagttgcctcgaaaattaaagagatcatggagaaaggtgaactcgttccagatgaactgggtaatgcggtagtaaaacgccgcctgtcggagaaagactgcgaaaaaggctttattttggatggttatccgcgtaccgtgcgccaagcggaatatctggatagttttcttgaaagccagaatcgccagttgacagccgccgtgctgttcaaagtccccgaagatgaagttgtgcaacgtttaacctctcgcctgatctgtccgaaatgcgggcgtatctacaacatgatttttctgccaccaaaagaagacgagctgtgtgacgattgcggtgtcggcttagtacagcgtgatgatgataaggaagaaaccgtccgtcaccgcctgaaagtctaccttgagaagacccagccggtcattgactattatagtaagaaaggtattctcaaacgcgtagatgggtcgcaaggaatcgacaacgttgttgcagaagtcctggggattctgggttggagcgataag

SEQ ID NO: 810 - protein, 231 aa, synthetic construct
  REGION 1..231: note = Variant of adenylate kinase
MHHHHHHGGSGMGAYLVFLGPPGAGKGTQGRRISAKTGIPHISTGDIFRDIVAKQNDEVASKIKEIMEKGELVPDELGNAVVKRRLSEKDCEKGFILDGYPRTVRQAEYLDSFLESQNRQLTAAVLFKVPEDEVVQRLTSRLICPKCGRIYNMIFLPPKEDELCDDCGVGLVQRDDDKEETVRHRLKVYLEKTQPVIDYYSKKGILKRVDGSQGIDNVVAEVLGILGWSDK

SEQ ID NO: 811 - DNA, 693 bp, synthetic construct
  misc_feature 1..693: note = Variant of adenylate kinase
  source 1..693: mol_type = other DNA
atgcaccatcatcaccatcacgggggctccggcatgggggcatatctggtgttcctgggtccgccgggcgcgggaaaaggtacccaaggccgtcgcatttcggcaaagactggcatcccgcatattagcacgggcgatatcttccgtgacatcgtcgctaagcaaaacgatgaagttgcctcgaaaattaaagagatcatggagaaaggtgaactcgttccagatgaactgggtaatgcggtagtaaaacgccgcctgtcggagaaagactgcgaaaaaggctttattttggatggttatccgcgtaccgtgcgccaagcggaatatctggatagttttcttgaaagccagaatcgccagttgacagccgccgtgctgttcaaagtccccgaagatgaagttcgtcagcgtctgacctctcgcctgatctgtccgaaatgcgggcgtatctacaacatgatttttctgccaccaaaagaagacgagctgtgtgacgattgcggtgtcggcttagtacagcgtgatgatgataaggaagaaacggtccgtcaccgcctgaaagtctaccttgagaagacccagccggtcattgactattatagtaagaaaggtattctcaaacgcgtagatgggtcgcaaggaatcgacaacgttgttgcagaagtcctggggattctgggttggagcgataag

SEQ ID NO: 812 - protein, 231 aa, synthetic construct
  REGION 1..231: note = Variant of adenylate kinase
MHHHHHHGGSGMGAYLVFLGPPGAGKGTQGRRISAKTGIPHISTGDIFRDIVAKQNDEVASKIKEIMEKGELVPDELGNAVVKRRLSEKDCEKGFILDGYPRTVRQAEYLDSFLESQNRQLTAAVLFKVPEDEVRQRLTSRLICPKCGRIYNMIFLPPKEDELCDDCGVGLVQRDDDKEETVRHRLKVYLEKTQPVIDYYSKKGILKRVDGSQGIDNVVAEVLGILGWSDK

SEQ ID NO: 813 - DNA, 693 bp, synthetic construct
  misc_feature 1..693: note = Variant of adenylate kinase
  source 1..693: mol_type = other DNA
atgcaccatcatcaccatcacgggggctccggcatgggggcatatctggtgttcttaggtccgccgggcgcgggaaaaggtacccaaggccgtcgcatttcggcaaagactggcatcccgcatattagcacgggcgatatcttccgtgacatcgtcgctaagcaaaacgatgaactggcctcgaaaattaaagagatcatggagaaaggtgaactcgttccagatgaactgggtaatgcggtagtaaaacgccgcctgtcggagaaagactgcgaaaaaggctttattttggatggttatccgcgtaccgtgcgccaagcggaatatctggatagttttcttgaaagccagaatcgccagttgacagccgccgtgctgttcaaagtccccgaagatgaagttgtgcaacgtttaacctctcgcctgatctgtccgaaatgcgggcgtatctacaacatgatttttctgccaccaaaagaagacgagctgtgtgacgattgcggtgtcggcttagtacagcgtgatgatgataaggaagaaacggtccgtcaccgcctgaaagtctaccttgagaagacccagccggtcattgactattatagtaagaaaggtattctcaaacgcgtagatgggtcgcaaggaatcgacaacgttttcgcagaagtcctggggattctgggttggagcgataag

SEQ ID NO: 814 - protein, 231 aa, synthetic construct
  REGION 1..231: note = Variant of adenylate kinase
MHHHHHHGGSGMGAYLVFLGPPGAGKGTQGRRISAKTGIPHISTGDIFRDIVAKQNDELASKIKEIMEKGELVPDELGNAVVKRRLSEKDCEKGFILDGYPRTVRQAEYLDSFLESQNRQLTAAVLFKVPEDEVVQRLTSRLICPKCGRIYNMIFLPPKEDELCDDCGVGLVQRDDDKEETVRHRLKVYLEKTQPVIDYYSKKGILKRVDGSQGIDNVFAEVLGILGWSDK

SEQ ID NO: 815 - DNA, 693 bp, synthetic construct
  misc_feature 1..693: note = Variant of adenylate kinase
  source 1..693: mol_type = other DNA
atgcaccatcatcaccatcacgggggctccggcatgggggcatatctggtgttcttaggtccgccgggcgcgggaaaaggtacccaaggccgtcgcatttcggcaaagactggcatcccgcatattagcacgggcgatatcttccgtgacatcgtcgctaagcaaaacgatgaagttgcctcgaaaattaaagagatcatggagaaaggtgaactcgttccagatgaactgggtaatgcggtagtaaaacgccgcctgtcggagaaagactgcgaaaaaggctttattttggatggttatccgcgtaccgtgcgccaagcggaatatctggatagttttcttgaaagccagaatcgccagttgacagccgccgtgctgttcaaagtccccgaagatgaagttgttcagcgtctgctgtctcgcctgatctgtccgaaatgcgggcgtatctacaacatgatttttctgccaccaaaagaagacgagctgtgtgacgattgcggtgtcggcttagtacagcgtgatgatgataaggaagaaacggtccgtcaccgcctgaaagtctaccttgagaagacccagccggtcattgactattatagtaagaaaggtattctcaaacgcgtagatgggtcgcaaggaatcgacaacgttgttgcagaagtcctggggattctgggttggagcgataag

SEQ ID NO: 816 - protein, 231 aa, synthetic construct
  REGION 1..231: note = Variant of adenylate kinase
MHHHHHHGGSGMGAYLVFLGPPGAGKGTQGRRISAKTGIPHISTGDIFRDIVAKQNDEVASKIKEIMEKGELVPDELGNAVVKRRLSEKDCEKGFILDGYPRTVRQAEYLDSFLESQNRQLTAAVLFKVPEDEVVQRLLSRLICPKCGRIYNMIFLPPKEDELCDDCGVGLVQRDDDKEETVRHRLKVYLEKTQPVIDYYSKKGILKRVDGSQGIDNVVAEVLGILGWSDK

SEQ ID NO: 817 - DNA, 693 bp, synthetic construct
  misc_feature 1..693: note = Variant of adenylate kinase
  source 1..693: mol_type = other DNA
atgcaccatcatcaccatcacgggggctccggcatgggggcatatctggtgttcctgggtccgccgggcgcgggaaaaggtacccaaggccgtcgcatttcggcaaagactggcatcccgcatattagcacgggcgatatcttccgtgacatcgtcgctaagcaaaacgatgaactggcctcgaaaattaaagagatcatggagaaaggtgaactcgttccagatgaactgggtaatgcggtagtaaaacgccgcctgtcggagaaagactgcgaaaaaggctttattttggatggttatccgcgtaccgtgcgccaagcggaatatctggatagttttcttgaaagccagaatcgccagttgacagccgccgtgctgttcaaagtccccgaagatgaagttgttcagcgtgtgacctctcgcctgatctgtccgaaatgcgggcgtatctacaacatgatttttctgccaccaaaagaagacgagctgtgtgacgattgcggtgtcggcttagtacagcgtgatgatgataaggaagaaacggtccgtcaccgcctgaaagtctaccttgagaagacccagccggtcattgactattatagtaagaaaggtattctcaaacgcgtagatgggtcgcaaggaatcgacaacgttgttgcagaagtcctggggattctgggttggagcgataag

SEQ ID NO: 818 - protein, 231 aa, synthetic construct
  REGION 1..231: note = Variant of adenylate kinase
MHHHHHHGGSGMGAYLVFLGPPGAGKGTQGRRISAKTGIPHISTGDIFRDIVAKQNDELASKIKEIMEKGELVPDELGNAVVKRRLSEKDCEKGFILDGYPRTVRQAEYLDSFLESQNRQLTAAVLFKVPEDEVVQRVTSRLICPKCGRIYNMIFLPPKEDELCDDCGVGLVQRDDDKEETVRHRLKVYLEKTQPVIDYYSKKGILKRVDGSQGIDNVVAEVLGILGWSDK

SEQ ID NO: 819 - DNA, 693 bp, synthetic construct
  misc_feature 1..693: note = Variant of adenylate kinase
  source 1..693: mol_type = other DNA
atgcaccatcatcaccatcacgggggctccggcatgggggcatatctggtgttcttaggtccgccgggcgcgggaaaaggtacccaaggccgtcgcatttcggcaaagactggcatcccgcatattagcacgggcgatatcttccgtgacatcgtcgctaagcaaaacgatgaactggcctcgaaaattaaagagatcatggagaaaggtgaactcgttccagatgaactgggtaatgcggtagtaaaacgccgcctgtcggagaaagactgcgaaaaaggctttattttggatggttatccgcgtaccgtgcgccaagcggaatatctggatagttttcttgaaagccagaatcgccagttgacagccgccgtggctttcaaagtccccgaagatgaagttgtgcaacgtttaacctctcgcctgatctgtccgaaatgcacgcgtatctacaacatgatttttctgccaccaaaagaagacgagctgtgtgacgattgcggtgtcggcttagtacagcgtgatgatgataaggaagaaacggtccgtcaccgcctgaaagtctaccttgagaagacccagccggtcattgactattatagtaagaaaggtattctcaaacgcgtagatgggtcgcaaggaatcgacaacgttctggcagaagtcctggggattctgggttggagcgataag

SEQ ID NO: 820 - protein, 231 aa, synthetic construct
  REGION 1..231: note = Variant of adenylate kinase
MHHHHHHGGSGMGAYLVFLGPPGAGKGTQGRRISAKTGIPHISTGDIFRDIVAKQNDELASKIKEIMEKGELVPDELGNAVVKRRLSEKDCEKGFILDGYPRTVRQAEYLDSFLESQNRQLTAAVAFKVPEDEVVQRLTSRLICPKCTRIYNMIFLPPKEDELCDDCGVGLVQRDDDKEETVRHRLKVYLEKTQPVIDYYSKKGILKRVDGSQGIDNVLAEVLGILGWSDK

SEQ ID NO: 821 - DNA, 693 bp, synthetic construct
  misc_feature 1..693: note = Variant of adenylate kinase
  source 1..693: mol_type = other DNA
atgcaccatcatcaccatcacgggggctccggcatgggggcatatctggtgttcctgggtccgccgggcgcgggaaaaggtacccaaggccgtcgcatttcggcaaagactggcatcccgcatattagcacgggcgatatcttccgtgacatcgtcgctaagcaaaacgatgaagttgcctcgaaaattaaagagatcatggagaaaggtgaactcgttccagatgaactgggtaatgcggtagtaaaacgccgcctgtcggagaaagactgcgaaaaaggctttattttggatggttatccgcgtaccgtgcgccaagcggaatatctggatagttttcttgaaagccagaatcgccagttgacagccgccgtgctgttcaaagtccccgaagatgaagttgtgcaacgtttaacctctcgcctgatctgtccgaaatgcgggcgtatctacaacatgatttttctgccaccaaaagaagacgagctgtgtgacgattgcggtgtcggcttagtacagcgtgatgatgataaggaagaaatcgtccgtcaccgcctgaaagtctaccttgagaagacccagccggtcattgactattatagtaagaaaggtattctcaaacgcgtagatgggtcgcaaggaatcgacaacgttgttgcagaagtcctggggattctgggttggagcgataag

SEQ ID NO: 822 - protein, 231 aa, synthetic construct
  REGION 1..231: note = Variant of adenylate kinase
MHHHHHHGGSGMGAYLVFLGPPGAGKGTQGRRISAKTGIPHISTGDIFRDIVAKQNDEVASKIKEIMEKGELVPDELGNAVVKRRLSEKDCEKGFILDGYPRTVRQAEYLDSFLESQNRQLTAAVLFKVPEDEVVQRLTSRLICPKCGRIYNMIFLPPKEDELCDDCGVGLVQRDDDKEEIVRHRLKVYLEKTQPVIDYYSKKGILKRVDGSQGIDNVVAEVLGILGWSDK

SEQ ID NO: 823 - DNA, 693 bp, synthetic construct
  misc_feature 1..693: note = Variant of adenylate kinase
  source 1..693: mol_type = other DNA
atgcaccatcatcaccatcacgggggctccggcatgggggcatatctggtgttcttaggtccgccgggcgcgggaaaaggtacccaaggccgtcgcatttcggcaaagactggcatcccgcatattagcacgggcgatatcttccgtgacatcgtcgctaagcaaaacgatgaactggcctcgaaaattaaagagatcatggagaaaggtgaactcgttccagatgaactgggtaatgcgattgtaaaacgccgcctgtcggagaaagactgcgaaaaaggctttattttggatggttatccgcgtaccgtgcgccaagcggaatatctggatagttttcttgaaagccagaatcgccagttgacagccgccgtgctgttcaaagtccccgaagatgaagttgtgcaacgtttaacctctcgcctgatctgtccgaaatgcgggcgtatctacaacatgatttttctgccaccaaaagaagacgagctgtgtgacgattgcggtgtcggcttagtacagcgtgatgatgataaggaagaaacggtccgtcaccgcctgaaagtctaccttgagaagacccagccggtcattgactattatagtaagaaaggtattctcaaacgcgtagatgggtcgcaaggaatcgacaacgttgttgcagaagtcctggggattctgggttggagcgataag

SEQ ID NO: 824 - protein, 231 aa, synthetic construct
  REGION 1..231: note = Variant of adenylate kinase
MHHHHHHGGSGMGAYLVFLGPPGAGKGTQGRRISAKTGIPHISTGDIFRDIVAKQNDELASKIKEIMEKGELVPDELGNAIVKRRLSEKDCEKGFILDGYPRTVRQAEYLDSFLESQNRQLTAAVLFKVPEDEVVQRLTSRLICPKCGRIYNMIFLPPKEDELCDDCGVGLVQRDDDKEETVRHRLKVYLEKTQPVIDYYSKKGILKRVDGSQGIDNVVAEVLGILGWSDK

SEQ ID NO: 825 - DNA, 693 bp, synthetic construct
  misc_feature 1..693: note = Variant of adenylate kinase
  source 1..693: mol_type = other DNA
atgcaccatcatcaccatcacgggggctccggcatgggggcatatctggtgttcttaggtccgccgggcgcgggaaaaggtacccaaggccgtcgcatttcggcaaagactggcatcccgcatattagcacgggcgatatcttccgtgacatcgtcgctaagcaaaacgatgaactggcctcgaaaattaaagagcaaatggagaaaggtgaactcgttccagatgaactgggtaatgcgattgtaaaacgccgcctgtcggagaaagactgcgaaaaaggctttattttggatggttatccgcgtaccgtgcgccaagcggaatatctggatagttttcttgaaagccagaatcgccagttgacagccgccgtgctgttcaaagtccccgaagatgaagttgtgcaacgtttaacctctcgcctgatctgtccgaaatgcgggcgtatctacaacatgatttttctgccaccaaaagaagacgagctgtgtgacgattgcggtgtcggcttagtacagcgtgatgatgataaggaagaaacggtccgtcaccgcctgaaagtctaccttgagaagacccagccggtcattgactattatagtaagaaaggtattctcaaacgcgtagatgggtcgcaaggaatcgacaacgttctggcagaagtcctggggattctgggttggagcgataag

SEQ ID NO: 826 - protein, 231 aa, synthetic construct
  REGION 1..231: note = Variant of adenylate kinase
MHHHHHHGGSGMGAYLVFLGPPGAGKGTQGRRISAKTGIPHISTGDIFRDIVAKQNDELASKIKEQMEKGELVPDELGNAIVKRRLSEKDCEKGFILDGYPRTVRQAEYLDSFLESQNRQLTAAVLFKVPEDEVVQRLTSRLICPKCGRIYNMIFLPPKEDELCDDCGVGLVQRDDDKEETVRHRLKVYLEKTQPVIDYYSKKGILKRVDGSQGIDNVLAEVLGILGWSDK

SEQ ID NO: 827 - DNA, 693 bp, synthetic construct
  misc_feature 1..693: note = Variant of adenylate kinase
  source 1..693: mol_type = other DNA
atgcaccatcatcaccatcacgggggctccggcatgggggcatatctggtgttcttaggtccgccgggcgcgggaaaaggtacccaaggccgtcgcatttcggcaaagactggcatcccgcatattagcacgggcgatatcttccgtgacatcgtcgctaagcaaaacgatgaactggcctcgaaaattaaagagatcatggagaaaggtgaactcgttccagatgaactgggtaatgcggttgtaaaacgccgcctgtcggagaaagactgcgaaaaaggctttattttggatggttatccgcgtaccgtgcgccaagcggaatatctggatagttttcttgaaagccagaatcgccagttgacagccgccgtgctgttcaaagtccccgaagatgaagttgtgcaacgtttaacctctcgcctgatctgtccgaaatgcgggcgtatctacaacatgatttttctgccaccaaaagaagacgagctgtgtgacgattgcggtgtcggcttagtacagcgtgatgatgataaggaagaaacggtccgtcaccgcctgaaagtctaccttgagaagacccagccggtcattgactattatagtaagaaaggtattctcaaacgcgtagatgggtcgcaaggaatcgacaacgttctggcagaagtcctggggattctgggttggagcgataag

SEQ ID NO: 828 - protein, 231 aa, synthetic construct
  REGION 1..231: note = Variant of adenylate kinase
MHHHHHHGGSGMGAYLVFLGPPGAGKGTQGRRISAKTGIPHISTGDIFRDIVAKQNDELASKIKEIMEKGELVPDELGNAVVKRRLSEKDCEKGFILDGYPRTVRQAEYLDSFLESQNRQLTAAVLFKVPEDEVVQRLTSRLICPKCGRIYNMIFLPPKEDELCDDCGVGLVQRDDDKEETVRHRLKVYLEKTQPVIDYYSKKGILKRVDGSQGIDNVLAEVLGILGWSDK

SEQ ID NO: 829 - DNA, 693 bp, synthetic construct
  misc_feature 1..693: note = Variant of adenylate kinase
  source 1..693: mol_type = other DNA
atgcaccatcatcaccatcacgggggctccggcatgggggcatatctggtgttcttaggtccgccgggcgcgggaaaaggtacccaaggccgtcgcatttcggcaaagactggcatcccgcatattagcacgggcgatatcttccgtgacatcgtcgctaagcaaaacgatgaactggcctcgaaaattaaagagatcatggagaaaggtgaactcgttccagatgaactgggtaatgcggtagtaaaacgccgcctgtcggagaaagactgcgaaaaaggctttattttggatggttatccgcgtaccgtgcgccaagcggaatatctggatagttttcttgaaagccagaatcgccagttgacagccgccgtggctttcaaagtccccgaagatgaagttgtgcaacgtttaacctctcgcctgatctgtccgaaatgcgggcgtatctacaacatgatttttctgccaccaaaagaagacgagctgtgtgacgattgcggtgtcggcttagtacagcgtgatgatgataaggaagaaacggtccgtcaccgcctgaaagtctaccttgagaagacccagccggtcattgactattatagtaagaaaggtattctcaaacgcgtagatgggtcgcaaggaatcgacaacgttctggcagaagtcctggggattctgggttggagcgataag

SEQ ID NO: 830 - protein, 231 aa, synthetic construct
  REGION 1..231: note = Variant of adenylate kinase
MHHHHHHGGSGMGAYLVFLGPPGAGKGTQGRRISAKTGIPHISTGDIFRDIVAKQNDELASKIKEIMEKGELVPDELGNAVVKRRLSEKDCEKGFILDGYPRTVRQAEYLDSFLESQNRQLTAAVAFKVPEDEVVQRLTSRLICPKCGRIYNMIFLPPKEDELCDDCGVGLVQRDDDKEETVRHRLKVYLEKTQPVIDYYSKKGILKRVDGSQGIDNVLAEVLGILGWSDK

SEQ ID NO: 831 - DNA, 693 bp, synthetic construct
  misc_feature 1..693: note = Variant of adenylate kinase
  source 1..693: mol_type = other DNA
atgcaccatcatcaccatcacgggggctccggcatgggggcatatctggtgttcttaggtccgccgggcgcgggaaaaggtacccaaggccgtcgcatttcggcaaagactggcatcccgcatattagcacgggcgatatcttccgtgacatcgtcgctaagcaaaacgatgaactggcctcgaaaattaaagagcaaatggcgaaaggtgaactcgttccagatgaactgggtaatgcgattgtaaaacgccgcctgtcggagaaagactgcgaaaaaggctttattttggatggttatccgcgtaccgtgcgccaagcggaatatctggatagttttcttgaaagccagaatcgccagttgacagccgccgtgctgttcaaagtccccgaagatgaagttgtgcaacgtttaacctctcgcctgatctgtccgaaatgcacgcgtatctacaacatgatttttctgccaccaaaagaagacgagctgtgtgacgattgcggtgtcggcttagtacagcgtgatgatgataaggaagaaacggtccgtcaccgcctgaaagtctaccttgagaagacccagccggtcattgactattatagtaagaaaggtattctcaaacgcgtagatgggtcgcaaggaatcgacaacgttctggcagaagtcctggggattctgggttggagcgataag

SEQ ID NO: 832 - protein, 231 aa, synthetic construct
  REGION 1..231: note = Variant of adenylate kinase
MHHHHHHGGSGMGAYLVFLGPPGAGKGTQGRRISAKTGIPHISTGDIFRDIVAKQNDELASKIKEQMAKGELVPDELGNAIVKRRLSEKDCEKGFILDGYPRTVRQAEYLDSFLESQNRQLTAAVLFKVPEDEVVQRLTSRLICPKCTRIYNMIFLPPKEDELCDDCGVGLVQRDDDKEETVRHRLKVYLEKTQPVIDYYSKKGILKRVDGSQGIDNVLAEVLGILGWSDK

SEQ ID NO: 833 - DNA, 693 bp, synthetic construct
  misc_feature 1..693: note = Variant of adenylate kinase
  source 1..693: mol_type = other DNA
atgcaccatcatcaccatcacgggggctccggcatgggggcatatctggtgttcttaggtccgccgggcgcgggaaaaggtacccaaggccgtcgcatttcggcaaagactggcatcccgcatattagcacgggcgatatcttccgtgacatcgtcgctaagcaaaacgatgaactggcctcgaaaattaaagagatcatggagaaaggtgaactcgttccagatgaactgggtaatgcggtagtaaaacgccgcctgtcggagaaagactgcgaaaaaggctttattttggatggttatccgcgtaccgtgcgccaagcggaatatctggatagttttcttgaaagccagaatcgccagttgacagccgccgtgctgttcaaagtccccgaagatgaagttgtgcaacgtttaacctctcgcctgatctgtccgaaatgcgggcgtatctacaacatgatttttctgccaccaaaagaagacgagctgtgtgacgattgcggtgtcggcttagtacagcgtgatgatgataaggaagaaatcgtccgtcaccgcctgaaagtctaccttgagaagacccagccggtcattgactattatagtaagaaaggtattctcaaacgcgtagatgggtcgcaaggaatcgacaacgttgttgcagaagtcctggggattctgggttggagcgataag

SEQ ID NO: 834 - protein, 231 aa, synthetic construct
  REGION 1..231: note = Variant of adenylate kinase
MHHHHHHGGSGMGAYLVFLGPPGAGKGTQGRRISAKTGIPHISTGDIFRDIVAKQNDELASKIKEIMEKGELVPDELGNAVVKRRLSEKDCEKGFILDGYPRTVRQAEYLDSFLESQNRQLTAAVLFKVPEDEVVQRLTSRLICPKCGRIYNMIFLPPKEDELCDDCGVGLVQRDDDKEEIVRHRLKVYLEKTQPVIDYYSKKGILKRVDGSQGIDNVVAEVLGILGWSDK

SEQ ID NO: 835 - DNA, 693 bp, synthetic construct
  misc_feature 1..693: note = Variant of adenylate kinase
  source 1..693: mol_type = other DNA
atgcaccatcatcaccatcacgggggctccggcatgggggcatatctggtgttcttaggtccgccgggcgcgggaaaaagtacccaaggccgtcgcatttcggcaaagactggcatcccgcatattagcacgggcgatatcttccgtgacatcgtcgctaagcaaaacgatgaactggcctcgaaaattaaagagatcatggagaaaggtgaactcgttccagatgaactgggtaatgcggtagtaaaacgccgcctgtcggagaaagactgcgaaaaaggctttattttggatggttatccgcgtaccgtgcgccaagcggaatatctggatagttttcttgaaagccagaatcgccagttgacagccgccgtgctgttcaaagtccccgaagatgaagttgtgcaacgtttaacctctcgcctgatctgtccgaaatgccaccgtatctacaacatgatttttctgccaccaaaagaagacgagctgtgtgacgattgcggtgtcggcttagtacagcgtgatgatgataaggaagaaacggtccgtcaccgcctgaaagtctaccttgagaagacccagccggtcattgactattatagtaagaaaggtattctcaaacgcgtagatgggtcgcaaggaatcgacaacgttgttgcagaagtcctggggattctgggttggagcgataag

SEQ ID NO: 836 - protein, 231 aa, synthetic construct
  REGION 1..231: note = Variant of adenylate kinase
MHHHHHHGGSGMGAYLVFLGPPGAGKSTQGRRISAKTGIPHISTGDIFRDIVAKQNDELASKIKEIMEKGELVPDELGNAVVKRRLSEKDCEKGFILDGYPRTVRQAEYLDSFLESQNRQLTAAVLFKVPEDEVVQRLTSRLICPKCHRIYNMIFLPPKEDELCDDCGVGLVQRDDDKEETVRHRLKVYLEKTQPVIDYYSKKGILKRVDGSQGIDNVVAEVLGILGWSDK

SEQ ID NO: 837 - DNA, 693 bp, synthetic construct
  misc_feature 1..693: note = Variant of adenylate kinase
  source 1..693: mol_type = other DNA
atgcaccatcatcaccatcacgggggctccggcatgggggcatatctggtgttcctgggtccgccgggcgcgggaaaaggtacccaaggccgtcgcatttcggcaaagactggcatcccgcatattagcacgggcgatatcttccgtgacatcgtcgctaagcaaaacgatgaactggcctcgaaaattaaagagatcatggagaaaggtgaactcgttccagatgaactgggtaatgcggtagtaaaacgccgcctgtcggagaaagactgcgaaaaaggctttattttggatggttatccgcgtaccgtgcgccaagcggaatatctggatagttttcttgaaagccagaatcgccagttgacagccgccgtgctgttcaaagtccccgaagatgaagttcgtctgcgtctgcgttctcgcctgatctgtccgaaatgcgggcgtatctacaacatgatttttctgccaccaaaagaagacgagctgtgtgacgattgcggtgtcggcttagtacagcgtgatgatgataaggaagaaacggtccgtcaccgcctgaaagtctaccttgagaagacccagccggtcattgactattatagtaagaaaggtattctcaaacgcgtagatgggtcgcaaggaatcgacaacgttgttgcagaagtcctggggattctgggttggagcgataag

SEQ ID NO: 838 - protein, 231 aa, synthetic construct
  REGION 1..231: note = Variant of adenylate kinase
MHHHHHHGGSGMGAYLVFLGPPGAGKGTQGRRISAKTGIPHISTGDIFRDIVAKQNDELASKIKEIMEKGELVPDELGNAVVKRRLSEKDCEKGFILDGYPRTVRQAEYLDSFLESQNRQLTAAVLFKVPEDEVRLRLRSRLICPKCGRIYNMIFLPPKEDELCDDCGVGLVQRDDDKEETVRHRLKVYLEKTQPVIDYYSKKGILKRVDGSQGIDNVVAEVLGILGWSDK

SEQ ID NO: 839 - DNA, 693 bp, synthetic construct
  misc_feature 1..693: note = Variant of adenylate kinase
  source 1..693: mol_type = other DNA
atgcaccatcatcaccatcacgggggctccggcatgggggcatatctggtgttcctgggtccgccgggcgcgggaaaaggtacccaaggccgtcgcatttcggcaaagactggcatcccgcatattagcacgggcgatatcttccgtgacatcgtcgctaagcaaaacgatgaactggcctcgaaaattaaagagatcatggagaaaggtgaactcgttccagatgaactgggtaatgcggtagtaaaacgccgcctgtcggagaaagactgcgaaaaaggctttattttggatggttatccgcgtaccgtgcgccaagcggaatatctggatagttttcttgaaagccagaatcgccagttgacagccgccgtgctgttcaaagtccccgaagatgaagttgttctgcgtgtgcgttctcgcctgatctgtccgaaatgcgggcgtatctacaacatgatttttctgccaccaaaagaagacgagctgtgtgacgattgcggtgtcggcttagtacagcgtgatgatgataaggaagaaacggtccgtcaccgcctgaaagtctaccttgagaagacccagccggtcattgactattatagtaagaaaggtattctcaaacgcgtagatgggtcgcaaggaatcgacaacgttgttgcagaagtcctggggattctgggttggagcgataag

SEQ ID NO: 840 - protein, 231 aa, synthetic construct
  REGION 1..231: note = Variant of adenylate kinase
MHHHHHHGGSGMGAYLVFLGPPGAGKGTQGRRISAKTGIPHISTGDIFRDIVAKQNDELASKIKEIMEKGELVPDELGNAVVKRRLSEKDCEKGFILDGYPRTVRQAEYLDSFLESQNRQLTAAVLFKVPEDEVVLRVRSRLICPKCGRIYNMIFLPPKEDELCDDCGVGLVQRDDDKEETVRHRLKVYLEKTQPVIDYYSKKGILKRVDGSQGIDNVVAEVLGILGWSDK

SEQ ID NO: 841 - DNA, 693 bp, synthetic construct
  misc_feature 1..693: note = Variant of adenylate kinase
  source 1..693: mol_type = other DNA
atgcaccatcatcaccatcacgggggctccggcatgggggcatatctggtgttcttaggtccgccgggcgcgggaaaaggtacccaaggccgtcgcatttcggcaaagactggcatcccgcatattagcacgggcgatatcttccgtgacatcgtcgctaagcaaaacgatgaactggcctcgaaaattaaagagatcatggagaaaggtgaactcgttccagatgaactgggtaatgcggtagtaaaacgccgcctgtcggagaaagactgcgaaaaaggctttattttggatggttatccgcgtaccgtgcgccaagcggaatatctggatagttttcttgaaagccagaatcgccagttgacagccgccgtgctgttcaaagtccccgaagatgaagttgtgcaacgtttaacctctcgcctgatctgtccgaaatgcacgcgtatctacaacatgatttttctgccaccaaaagaagacgagctgtgtgacgattgcggtgtcggcttagtacagcgtgatgatgataaggaagaaacggtccgtcaccgcctgaaagtctaccttgagaagacccagccggtcattgactattatagtaagaaaggtattctcaaacgcgtagatgggtcgcaaggaatcgacaacgttgttgcagaagtcctggggattctgggttggagcgataag

SEQ ID NO: 842 - protein, 231 aa, synthetic construct
  REGION 1..231: note = Variant of adenylate kinase
MHHHHHHGGSGMGAYLVFLGPPGAGKGTQGRRISAKTGIPHISTGDIFRDIVAKQNDELASKIKEIMEKGELVPDELGNAVVKRRLSEKDCEKGFILDGYPRTVRQAEYLDSFLESQNRQLTAAVLFKVPEDEVVQRLTSRLICPKCTRIYNMIFLPPKEDELCDDCGVGLVQRDDDKEETVRHRLKVYLEKTQPVIDYYSKKGILKRVDGSQGIDNVVAEVLGILGWSDK

SEQ ID NO: 843 - DNA, 693 bp, synthetic construct
  misc_feature 1..693: note = Variant of adenylate kinase
  source 1..693: mol_type = other DNA
atgcaccatcatcaccatcacgggggctccggcatgggggcatatctggtgttcttaggtccgccgggcgcgggaaaaggtacccaaggccgtcgcatttcggcaaagactggcatcccgcatattagcacgggcgatatcttccgtgacatcgtcgctaagcaaaacgatgaagttgcctcgaaaattaaagagatcatggagaaaggtgaactcgttccagatgaactgggtaatgcggtagtaaaacgccgcctgtcggagaaagactgcgaaaaaggctttattttggatggttatccgcgtaccgtgcgccaagcggaatatctggatagttttcttgaaagccagaatcgccagttgacagccgccgtgctgttcaaagtccccgaagatgaagttcgtcagcgtgtgacctctcgcctgatctgtccgaaatgcgggcgtatctacaacatgatttttctgccaccaaaagaagacgagctgtgtgacgattgcggtgtcggcttagtacagcgtgatgatgataaggaagaaatcgtccgtcaccgcctgaaagtctaccttgagaagacccagccggtcattgactattatagtaagaaaggtattctcaaacgcgtagatgggtcgcaaggaatcgacaacgttgttgcagaagtcctggggattctgggttggagcgataag

SEQ ID NO: 844 - protein, 231 aa, synthetic construct
  REGION 1..231: note = Variant of adenylate kinase
MHHHHHHGGSGMGAYLVFLGPPGAGKGTQGRRISAKTGIPHISTGDIFRDIVAKQNDEVASKIKEIMEKGELVPDELGNAVVKRRLSEKDCEKGFILDGYPRTVRQAEYLDSFLESQNRQLTAAVLFKVPEDEVRQRVTSRLICPKCGRIYNMIFLPPKEDELCDDCGVGLVQRDDDKEEIVRHRLKVYLEKTQPVIDYYSKKGILKRVDGSQGIDNVVAEVLGILGWSDK

SEQ ID NO: 845 - DNA, 693 bp, synthetic construct
  misc_feature 1..693: note = Variant of adenylate kinase
  source 1..693: mol_type = other DNA
atgcaccatcatcaccatcacgggggctccggcatgggggcatatctggtgttcttaggtccgccgggcgcgggaaaaggtacccaaggccgtcgcatttcggcaaagactggcatcccgcatattagcacgggcgatatcttccgtgacatcgtcgctaagcaaaacgatgaagttgcctcgaaaattaaagagatcatggagaaaggtgaactcgttccagatgaactgggtaatgcggtagtaaaacgccgcctgtcggagaaagactgcgaaaaaggctttattttggatggttatccgcgtaccgtgcgccaagcggaatatctggatagttttcttgaaagccagaatcgccagttgacagccgccgtgctgttcaaagtccccgaagatgaagttcgtctgcgtgtgcgttctcgcctgatctgtccgaaatgcgggcgtatctacaacatgatttttctgccaccaaaagaagacgagctgtgtgacgattgcggtgtcggcttagtacagcgtgatgatgataaggaagaaacggtccgtcaccgcctgaaagtctaccttgagaagacccagccggtcattgactattatagtaagaaaggtattctcaaacgcgtagatgggtcgcaaggaatcgacaacgttgttgcagaagtcctggggattctgggttggagcgataag

SEQ ID NO: 846 - protein, 231 aa, synthetic construct
  REGION 1..231: note = Variant of adenylate kinase
MHHHHHHGGSGMGAYLVFLGPPGAGKGTQGRRISAKTGIPHISTGDIFRDIVAKQNDEVASKIKEIMEKGELVPDELGNAVVKRRLSEKDCEKGFILDGYPRTVRQAEYLDSFLESQNRQLTAAVLFKVPEDEVRLRVRSRLICPKCGRIYNMIFLPPKEDELCDDCGVGLVQRDDDKEETVRHRLKVYLEKTQPVIDYYSKKGILKRVDGSQGIDNVVAEVLGILGWSDK

SEQ ID NO: 847 - DNA, 693 bp, synthetic construct
  misc_feature 1..693: note = Variant of adenylate kinase
  source 1..693: mol_type = other DNA
atgcaccatcatcaccatcacgggggctccggcatgggggcatatctggtgttcttaggtccgccgggcgcgggaaaaggtacccaaggccgtcgcatttcggcaaagactggcatcccgcatattagcacgggcgatatcttccgtgacatcgtcgctaagcaaaacgatgaagttgcctcgaaaattaaagagatcatggagaaaggtgaactcgttccagatgaactgggtaatgcggtagtaaaacgccgcctgtcggagaaagactgcgaaaaaggctttattttggatggttatccgcgtaccgtgcgccaagcggaatatctggatagttttcttgaaagccagaatcgccagttgacagccgccgtgctgttcaaagtccccgaagatgaagttcgtctgcgtgtgacctctcgcctgatctgtccgaaatgcgggcgtatctacaacatgatttttctgccaccaaaagaagacgagctgtgtgacgattgcggtgtcggcttagtacagcgtgatgatgataaggaagaaatcgtccgtcaccgcctgaaagtctaccttgagaagacccagccggtcattgactattatagtaagaaaggtattctcaaacgcgtagatgggtcgcaaggaatcgacaacgttgttgcagaagtcctggggattctgggttggagcgataag

SEQ ID NO: 848 - protein, 231 aa, synthetic construct
  REGION 1..231: note = Variant of adenylate kinase
MHHHHHHGGSGMGAYLVFLGPPGAGKGTQGRRISAKTGIPHISTGDIFRDIVAKQNDEVASKIKEIMEKGELVPDELGNAVVKRRLSEKDCEKGFILDGYPRTVRQAEYLDSFLESQNRQLTAAVLFKVPEDEVRLRVTSRLICPKCGRIYNMIFLPPKEDELCDDCGVGLVQRDDDKEEIVRHRLKVYLEKTQPVIDYYSKKGILKRVDGSQGIDNVVAEVLGILGWSDK

SEQ ID NO: 849 - DNA, 693 bp, synthetic construct
  misc_feature 1..693: note = Variant of adenylate kinase
  source 1..693: mol_type = other DNA
atgcaccatcatcaccatcacgggggctccggcatgggggcatatctggtgttcttaggtccgccgggcgcgggaaaaggtacccaaggccgtcgcatttcggcaaagactggcatcccgcatattagcacgggcgatatcttccgtgacatcgtcgctaagcaaaacgatgaactggcctcgaaaattaaagagcaaatggggaaaggtgaactcgttccagatgaactgggtaatgcgattgtaaaacgccgcctgtcggagaaagactgcgaaaaaggctttattttggatggttatccgcgtaccgtgcgccaagcggaatatctggatagttttcttgaaagccagaatcgccagttgacagccgccgtgctgttcaaagtccccgaagatgaagttgtgcaacgtttaacctctcgcctgatctgtccgaaatgccaccgtatctacaacatgatttttctgccaccaaaagaagacgagctgtgtgacgattgcggtgtcggcttagtacagcgtgatgatgataaggaagaaacggtccgtcaccgcctgaaagtctaccttgagaagacccagccggtcattgactattatagtaagaaaggtattctcaaacgcgtagatgggtcgcaaggaatcgacaacgttctggcagaagtcctggggattctgggttggagcgataag

SEQ ID NO: 850 - protein, 231 aa, synthetic construct
  REGION 1..231: note = Variant of adenylate kinase
MHHHHHHGGSGMGAYLVFLGPPGAGKGTQGRRISAKTGIPHISTGDIFRDIVAKQNDELASKIKEQMGKGELVPDELGNAIVKRRLSEKDCEKGFILDGYPRTVRQAEYLDSFLESQNRQLTAAVLFKVPEDEVVQRLTSRLICPKCHRIYNMIFLPPKEDELCDDCGVGLVQRDDDKEETVRHRLKVYLEKTQPVIDYYSKKGILKRVDGSQGIDNVLAEVLGILGWSDK

SEQ ID NO: 851 - DNA, 693 bp, synthetic construct
  misc_feature 1..693: note = Variant of adenylate kinase
  source 1..693: mol_type = other DNA
atgcaccatcatcaccatcacgggggctccggcatgggggcatatctggtgttcttaggtccgccgggcgcgggaaaaagtacccaaggccgtcgcatttcggcaaagactggcatcccgcatattagcacgggcgatatcttccgtgacatcgtcgctaagcaaaacgatgaactggcctcgaaaattaaagagatcatggagaaaggtgaactcgttccagatgaactgggtaatgcggtagtaaaacgccgcctgtcggagaaagactgcgaaaaaggctttattttggatggttatccgcgtaccgtgcgccaagcggaatatctggatagttttcttgaaagccagaatcgccagttgacagccgccgtgctgttcaaagtccccgaagatgaagttgtgcaacgtttaacctctcgcctgatctgtccgaaatgcgggcgtatctacaacatgatttttctgccaccaaaagaagacgagctgtgtgacgattgcggtgtcggcttagtacagcgtgatgatgataaggaagaaacggtccgtcaccgcctgaaagtctaccttgagaagacccagccggtcattgactattatagtaagaaaggtattctcaaacgcgtagatgggtcgcaaggaatcgacaacgttgtcgcagaagtcctggggattctgggttggagcgataag

SEQ ID NO: 852 - protein, 231 aa, synthetic construct
  REGION 1..231: note = Variant of adenylate kinase
MHHHHHHGGSGMGAYLVFLGPPGAGKSTQGRRISAKTGIPHISTGDIFRDIVAKQNDELASKIKEIMEKGELVPDELGNAVVKRRLSEKDCEKGFILDGYPRTVRQAEYLDSFLESQNRQLTAAVLFKVPEDEVVQRLTSRLICPKCGRIYNMIFLPPKEDELCDDCGVGLVQRDDDKEETVRHRLKVYLEKTQPVIDYYSKKGILKRVDGSQGIDNVVAEVLGILGWSDK

SEQ ID NO: 853 - DNA, 693 bp, synthetic construct
  misc_feature 1..693: note = Variant of adenylate kinase
  source 1..693: mol_type = other DNA
atgcaccatcatcaccatcacgggggctccggcatgggggcatatctggtgttcttaggtccgccgggcgcgggaaaaagtacccaaggccgtcgcatttcggcaaagactggcatcccgcatattagcacgggcgatatcttccgtgacatcgtcgctaagcaaaacgatgaactggcctcgaaaattaaagagatcatggagaaaggtgaactcgttccagatgaactgggtaatgcggttgtaaaacgccgcctgtcggagaaagactgcgaaaaaggctttattttggatggttatccgcgtaccgtgcgccaagcggaatatctggatagttttcttgaaagccagaatcgccagttgacagccgccgtggctttcaaagtccccgaagatgaagttgtgcaacgtttaacctctcgcctgatctgtccgaaatgcacgcgtatctacaacatgatttttctgccaccaaaagaagacgagctgtgtgacgattgcggtgtcggcttagtacagcgtgatgatgataaggaagaaacggtccgtcaccgcctgaaagtctaccttgagaagacccagccggtcattgactattatagtaagaaaggtattctcaaacgcgtagatgggtcgcaaggaatcgacaacgttgttgcagaagtcctggggattctgggttggagcgataag

SEQ ID NO: 854 - protein, 231 aa, synthetic construct
  REGION 1..231: note = Variant of adenylate kinase
MHHHHHHGGSGMGAYLVFLGPPGAGKSTQGRRISAKTGIPHISTGDIFRDIVAKQNDELASKIKEIMEKGELVPDELGNAVVKRRLSEKDCEKGFILDGYPRTVRQAEYLDSFLESQNRQLTAAVAFKVPEDEVVQRLTSRLICPKCTRIYNMIFLPPKEDELCDDCGVGLVQRDDDKEETVRHRLKVYLEKTQPVIDYYSKKGILKRVDGSQGIDNVVAEVLGILGWSDK

SEQ ID NO: 855 - DNA, 693 bp, synthetic construct
  misc_feature 1..693: note = Variant of adenylate kinase
  source 1..693: mol_type = other DNA
atgcaccatcatcaccatcacgggggctccggcatgggggcatatctggtgttcctgggtccgccgggcgcgggaaaaggtacccaaggccgtcgcatttcggcaaagactggcatcccgcatattagcacgggcgatatcttccgtgacatcgtcgctaagcaaaacgatgaactggcctcgaaaattaaagagatcatggagaaaggtgaactcgttccagatgaactgggtaatgcggtagtaaaacgccgcctgtcggagaaagactgcgaaaaaggctttattttggatggttatccgcgtaccgtgcgccaagcggaatatctggatagttttcttgaaagccagaatcgccagttgacagccgccgtgctgttcaaagtccccgaagatgaagttcgtctgcgtgtgacctctcgcctgatctgtccgaaatgcgggcgtatctacaacatgatttttctgccaccaaaagaagacgagctgtgtgacgattgcggtgtcggcttagtacagcgtgatgatgataaggaagaaaccgtccgtcaccgcctgaaagtctaccttgagaagacccagccggtcattgactattatagtaagaaaggtattctcaaacgcgtagatgggtcgcaaggaatcgacaacgttgttgcagaagtcctggggattctgggttggagcgataag

SEQ ID NO: 856 - protein, 231 aa, synthetic construct
  REGION 1..231: note = Variant of adenylate kinase
MHHHHHHGGSGMGAYLVFLGPPGAGKGTQGRRISAKTGIPHISTGDIFRDIVAKQNDELASKIKEIMEKGELVPDELGNAVVKRRLSEKDCEKGFILDGYPRTVRQAEYLDSFLESQNRQLTAAVLFKVPEDEVRLRVTSRLICPKCGRIYNMIFLPPKEDELCDDCGVGLVQRDDDKEETVRHRLKVYLEKTQPVIDYYSKKGILKRVDGSQGIDNVVAEVLGILGWSDK

SEQ ID NO: 857 - DNA, 693 bp, synthetic construct
  misc_feature 1..693: note = Variant of adenylate kinase
  source 1..693: mol_type = other DNA
atgcaccatcatcaccatcacgggggctccggcatgggggcatatctggtgttcttaggtccgccgggcgcgggaaaaggtacccaaggccgtcgcatttcggcaaagactggcatcccgcatattagcacgggcgatatcttccgtgacatcgtcgctaagcaaaacgatgaactggcctcgaaaattaaagagatcatggggaaaggtgaactcgttccagatgaactgggtaatgcgattgtaaaacgccgcctgtcggagaaagactgcgaaaaaggctttattttggatggttatccgcgtaccgtgcgccaagcggaatatctggatagttttcttgaaagccagaatcgccagttgacagccgccgtggctttcaaagtccccgaagatgaagttgtgcaacgtttaacctctcgcctgatctgtccgaaatgccaccgtatctacaacatgatttttctgccaccaaaagaagacgagctgtgtgacgattgcggtgtcggcttagtacagcgtgatgatgataaggaagaaacggtccgtcaccgcctgaaagtctaccttgagaagacccagccggtcattgactattatagtaagaaaggtattctcaaacgcgtagatgggtcgcaaggaatcgacaacgttctggcagaagtcctggggattctgggttggagcgataag

SEQ ID NO: 858 - protein, 231 aa, synthetic construct
  REGION 1..231: note = Variant of adenylate kinase
MHHHHHHGGSGMGAYLVFLGPPGAGKGTQGRRISAKTGIPHISTGDIFRDIVAKQNDELASKIKEIMGKGELVPDELGNAIVKRRLSEKDCEKGFILDGYPRTVRQAEYLDSFLESQNRQLTAAVAFKVPEDEVVQRLTSRLICPKCHRIYNMIFLPPKEDELCDDCGVGLVQRDDDKEETVRHRLKVYLEKTQPVIDYYSKKGILKRVDGSQGIDNVLAEVLGILGWSDK

SEQ ID NO: 859 - DNA, 693 bp, synthetic construct
  misc_feature 1..693: note = Variant of adenylate kinase
  source 1..693: mol_type = other DNA
atgcaccatcatcaccatcacgggggctccggcatgggggcatatctggtgttcctgggtccgccgggcgcgggaaaaggtacccaaggccgtcgcatttcggcaaagactggcatcccgcatattagcacgggcgatatcttccgtgacatcgtcgctaagcaaaacgatgaactggcctcgaaaattaaagagatcatggagaaaggtgaactcgttccagatgaactgggtaatgcggtagtaaaacgccgcctgtcggagaaagactgcgaaaaaggctttattttggatggttatccgcgtaccgtgcgccaagcggaatatctggatagttttcttgaaagccagaatcgccagttgacagccgccgtgctgttcaaagtccccgaagatgaagttgttctgcgtctgacctctcgcctgatctgtccgaaatgcgggcgtatctacaacatgatttttctgccaccaaaagaagacgagctgtgtgacgattgcggtgtcggcttagtacagcgtgatgatgataaggaagaaacggtccgtcaccgcctgaaagtctaccttgagaagacccagccggtcattgactattatagtaagaaaggtattctcaaacgcgtagatgggtcgcaaggaatcgacaacgttgttgcagaagtcctggggattctgggttggagcgataag

SEQ ID NO: 860 - protein, 231 aa, synthetic construct
  REGION 1..231: note = Variant of adenylate kinase
MHHHHHHGGSGMGAYLVFLGPPGAGKGTQGRRISAKTGIPHISTGDIFRDIVAKQNDELASKIKEIMEKGELVPDELGNAVVKRRLSEKDCEKGFILDGYPRTVRQAEYLDSFLESQNRQLTAAVLFKVPEDEVVLRLTSRLICPKCGRIYNMIFLPPKEDELCDDCGVGLVQRDDDKEETVRHRLKVYLEKTQPVIDYYSKKGILKRVDGSQGIDNVVAEVLGILGWSDK

SEQ ID NO: 861 - DNA, 693 bp, synthetic construct
  misc_feature 1..693: note = Variant of adenylate kinase
  source 1..693: mol_type = other DNA
atgcaccatcatcaccatcacgggggctccggcatgggggcatatctggtgttcttaggtccgccgggcgcgggaaaaagtacccaaggccgtcgcatttcggcaaagactggcatcccgcatattagcacgggcgatatcttccgtgacatcgtcgctaagcaaaacgatgaactggcctcgaaaattaaagagatcatggagaaaggtgaactcgttccagatgaactgggtaatgcggtagtaaaacgccgcctgtcggagaaagactgcgaaaaaggctttattttggatggttatccgcgtaccgtgcgccaagcggaatatctggatagttttcttgaaagccagaatcgccagttgacagccgccgtggctttcaaagtccccgaagatgaagttgtgcaacgtttaacctctcgcctgatctgtccgaaatgccaccgtatctacaacatgatttttctgccaccaaaagaagacgagctgtgtgacgattgcggtgtcggcttagtacagcgtgatgatgataaggaagaaacggtccgtcaccgcctgaaagtctaccttgagaagacccagccggtcattgactattatagtaagaaaggtattctcaaacgcgtagatgggtcgcaaggaatcgacaacgttgtcgcagaagtcctggggattctgggttggagcgataag

SEQ ID NO: 862 - protein, 231 aa, synthetic construct
  REGION 1..231: note = Variant of adenylate kinase
MHHHHHHGGSGMGAYLVFLGPPGAGKSTQGRRISAKTGIPHISTGDIFRDIVAKQNDELASKIKEIMEKGELVPDELGNAVVKRRLSEKDCEKGFILDGYPRTVRQAEYLDSFLESQNRQLTAAVAFKVPEDEVVQRLTSRLICPKCHRIYNMIFLPPKEDELCDDCGVGLVQRDDDKEETVRHRLKVYLEKTQPVIDYYSKKGILKRVDGSQGIDNVVAEVLGILGWSDK

SEQ ID NO: 863 - DNA, 693 bp, synthetic construct
  misc_feature 1..693: note = Variant of adenylate kinase
  source 1..693: mol_type = other DNA
atgcaccatcatcaccatcacgggggctccggcatgggggcatatctggtgttcttaggtccgccgggcgcgggaaaaggtacccaaggccgtcgcatttcggcaaagactggcatcccgcatattagcacgggcgatatcttccgtgacatcgtcgctaagcaaaacgatgaactggcctcgaaaattaaagagatcatggggaaaggtgaactcgttccagatgaactgggtaatgcggtagtaaaacgccgcctgtcggagaaagactgcgaaaaaggctttattttggatggttatccgcgtaccgtgcgccaagcggaatatctggatagttttcttgaaagccagaatcgccagttgacagccgccgtgctgttcaaagtccccgaagatgaagttgtgcaacgtttaacctctcgcctgatctgtccgaaatgcgggcgtatctacaacatgatttttctgccaccaaaagaagacgagctgtgtgacgattgcggtgtcggcttagtacagcgtgatgatgataaggaagaaacggtccgtcaccgcctgaaagtctaccttgagaagacccagccggtcattgactattatagtaagaaaggtattctcaaacgcgtagatgggtcgcaaggaatcgacaacgttgttgcagaagtcctggggattctgggttggagcgataag

SEQ ID NO: 864 - protein, 231 aa, synthetic construct
  REGION 1..231: note = Variant of adenylate kinase
MHHHHHHGGSGMGAYLVFLGPPGAGKGTQGRRISAKTGIPHISTGDIFRDIVAKQNDELASKIKEIMGKGELVPDELGNAVVKRRLSEKDCEKGFILDGYPRTVRQAEYLDSFLESQNRQLTAAVLFKVPEDEVVQRLTSRLICPKCGRIYNMIFLPPKEDELCDDCGVGLVQRDDDKEETVRHRLKVYLEKTQPVIDYYSKKGILKRVDGSQGIDNVVAEVLGILGWSDK

SEQ ID NO: 865 - DNA, 693 bp, synthetic construct
  misc_feature 1..693: note = Variant of adenylate kinase
  source 1..693: mol_type = other DNA
atgcaccatcatcaccatcacgggggctccggcatgggggcatatctggtgttcttaggtccgccgggcgcgggaaaaggtacccaaggccgtcgcatttcggcaaagactggcatcccgcatattagcacgggcgatatcttccgtgacatcgtcgctaagcaaaacgatgaactggcctcgaaaattaaagagatcatggagaaaggtgaactcgttccagatgaactgggtaatgcggtagtaaaacgccgcctgtcggagaaagactgcgaaaaaggctttattttggatggttatccgcgtaccgtgcgccaagcggaatatctggatagttttcttgaaagccagaatcgccagttgacagccgccgtggctttcaaagtccccgaagatgaagttgtgcaacgtttaacctctcgcctgatctgtccgaaatgcacgcgtatctacaacatgatttttctgccaccaaaagaagacgagctgtgtgacgattgcggtgtcggcttagtacagcgtgatgatgataaggaagaaacggtccgtcaccgcctgaaagtctaccttgagaagacccagccggtcattgactattatagtaagaaaggtattctcaaacgcgtagatgggtcgcaaggaatcgacaacgttgttgcagaagtcctggggattctgggttggagcgataag

SEQ ID NO: 866 - protein, 231 aa, synthetic construct
  REGION 1..231: note = Variant of adenylate kinase
MHHHHHHGGSGMGAYLVFLGPPGAGKGTQGRRISAKTGIPHISTGDIFRDIVAKQNDELASKIKEIMEKGELVPDELGNAVVKRRLSEKDCEKGFILDGYPRTVRQAEYLDSFLESQNRQLTAAVAFKVPEDEVVQRLTSRLICPKCTRIYNMIFLPPKEDELCDDCGVGLVQRDDDKEETVRHRLKVYLEKTQPVIDYYSKKGILKRVDGSQGIDNVVAEVLGILGWSDK

SEQ ID NO: 867 - DNA, 693 bp, synthetic construct
  misc_feature 1..693: note = Variant of adenylate kinase
  source 1..693: mol_type = other DNA
atgcaccatcatcaccatcacgggggctccggcatgggggcatatctggtgttcttaggtccgccgggcgcgggaaaaggtacccaaggccgtcgcatttcggcaaagactggcatcccgcatattagcacgggcgatatcttccgtgacatcgtcgctaagcaaaacgatgaactggcctcgaaaattaaagagatcatggagaaaggtgaactcgttccagatgaactgggtaatgcggtagtaaaacgccgcctgtcggagaaagactgcgaaaaaggctttattttggatggttatccgcgtaccgtgcgccaagcggaatatctggatagttttcttgaaagccagaatcgccagttgacagccgccgtgctgttcaaagtccccgaagatgaagttgttcagcgtgtgcgttctcgcctgatctgtccgaaatgcgggcgtatctacaacatgatttttctgccaccaaaagaagacgagctgtgtgacgattgcggtgtcggcttagtacagcgtgatgatgataaggaagaaaccgtccgtcaccgcctgaaagtctaccttgagaagacccagccggtcattgactattatagtaagaaaggtattctcaaacgcgtagatgggtcgcaaggaatcgacaacgttgttgcagaagtcctggggattctgggttggagcgataag

SEQ ID NO: 868 - protein, 231 aa, synthetic construct
  REGION 1..231: note = Variant of adenylate kinase
MHHHHHHGGSGMGAYLVFLGPPGAGKGTQGRRISAKTGIPHISTGDIFRDIVAKQNDELASKIKEIMEKGELVPDELGNAVVKRRLSEKDCEKGFILDGYPRTVRQAEYLDSFLESQNRQLTAAVLFKVPEDEVVQRVRSRLICPKCGRIYNMIFLPPKEDELCDDCGVGLVQRDDDKEETVRHRLKVYLEKTQPVIDYYSKKGILKRVDGSQGIDNVVAEVLGILGWSDK

SEQ ID NO: 869 - DNA, 693 bp, synthetic construct
  misc_feature 1..693: note = Variant of adenylate kinase
  source 1..693: mol_type = other DNA
atgcaccatcatcaccatcacgggggctccggcatgggggcatatctggtgttcttaggtccgccgggcgcgggaaaaggtacccaaggccgtcgcatttcggcaaagactggcatcccgcatattagcacgggcgatatcctgcgtgacatcgtcgctaagcaaaacgatgaagttgcctcgaaaattaaagagatcatggagaaaggtgaactcgttccagatgaactgggtaatgcggtagtaaaacgccgcctgtcggagaaagactgcgaaaaaggctttattttggatggtttcccgcgtaccgtgcgccaagcggaatatctggatagttttcttgaaagccagaatcgccagttgacagccgccgtgctgttcaaagtccccgaagatgaagttgttcagcgtctgctgtctcgcctgatctgtccgaaatgccaccgtatctacaacatgatttttctgccaccaaaagaagacgagctgtgtgacgattgcggtgtcggcttagtacagcgtgatgatgataaggaagaaacggtccgtcaccgcctgaaagtctaccttgagaagacccagccggtcattgactattatagtaagaaaggtattctcaaacgcgtagatgggtcgcaaggaatcgacaacgttgtggcagaagtcctggggattctgggttggagcgataag

SEQ ID NO: 870 - protein, 231 aa, synthetic construct
  REGION 1..231: note = Variant of adenylate kinase
MHHHHHHGGSGMGAYLVFLGPPGAGKGTQGRRISAKTGIPHISTGDILRDIVAKQNDEVASKIKEIMEKGELVPDELGNAVVKRRLSEKDCEKGFILDGFPRTVRQAEYLDSFLESQNRQLTAAVLFKVPEDEVVQRLLSRLICPKCHRIYNMIFLPPKEDELCDDCGVGLVQRDDDKEETVRHRLKVYLEKTQPVIDYYSKKGILKRVDGSQGIDNVVAEVLGILGWSDK

SEQ ID NO: 871 - DNA, 693 bp, synthetic construct
  misc_feature 1..693: note = Variant of adenylate kinase
  source 1..693: mol_type = other DNA
atgcaccatcatcaccatcacgggggctccggcatgggggcatatctggtgttcttaggtccgccgggcgcgggaaaaggtacccaaggccgtcgcatttcggcaaagactggcatcccgcatattagcacgggcgatatcctgcgtgacatcgtcgctaagcaaaacgatgaagttgcctcgaaaattaaagagttcatggagaaaggtgaactcgttccagatgaactgggtaatgcggtagtaaaacgccgcctgtcggagaaagactgcgaaaaaggctttattttggatggttatccgcgtaccgtgcgccaagcggaatatctggatagttttcttgaaagccagaatcgccagttgacagccgccgtgctgttcaaagtccccgaagatgaagttgttcagcgtctgctgtctcgcctgatctgtccgaaatgcttccgtatctacaacatgatttttctgccaccaaaagaagacgagctgtgtgacgattgcggtgtcggcttagtacagcgtgatgatgataaggaagaaacggtccgtcaccgcctgaaagtctaccttgagaagacccagccggtcattgactattatagtaagaaaggtattctcaaacgcgtagatgggtcgcaaggaatcgacaacgttctggcagaagtcctggggattctgggttggagcgataag

SEQ ID NO: 872 - protein, 231 aa, synthetic construct
  REGION 1..231: note = Variant of adenylate kinase
MHHHHHHGGSGMGAYLVFLGPPGAGKGTQGRRISAKTGIPHISTGDILRDIVAKQNDEVASKIKEFMEKGELVPDELGNAVVKRRLSEKDCEKGFILDGYPRTVRQAEYLDSFLESQNRQLTAAVLFKVPEDEVVQRLLSRLICPKCFRIYNMIFLPPKEDELCDDCGVGLVQRDDDKEETVRHRLKVYLEKTQPVIDYYSKKGILKRVDGSQGIDNVLAEVLGILGWSDK

SEQ ID NO: 873 - DNA, 693 bp, synthetic construct
  misc_feature 1..693: note = Variant of adenylate kinase
  source 1..693: mol_type = other DNA
atgcaccatcatcaccatcacgggggctccggcatgggggcatatctggtgttcttaggtccgccgggcgcgggaaaaggtacccaaggccgtcgcatttcggcaaagactggcatcccgcatattagcacgggcgatatcctgcgtgacatcgtcgctaagcaaaacgatgaagttgcctcgaaaattaaagagatcatggagaaaggtgaactcgttccagatgaactgggtaatgcggtagtaaaacgccgcctgtcggagaaagactgcgaaaaaggctttattttggatggtttcccgcgtaccgtgcgccaagcggaatatctggatagttttcttgaaagccagaatcgccagttgacagccgccgtgctgttcaaagtccccgaagatgaagttgttcagcgtctgctgtctcgcctgatctgtccgaaatgcgggcgtatctacaacatgatttttctgccaccaaaagaagacgagctgtgtgacgattgcggtgtcggcttagtacagcgtgatgatgataaggaagaaacggtccgtcaccgcctgaaagtctaccttgagaagacccagccggtcattgactattatagtaagaaaggtattctcaaacgcgtagatgggtcgcaaggaatcgacaacgttgtggcagaagtcctggggattctgggttggagcgataag

SEQ ID NO: 874 - protein, 231 aa, synthetic construct
  REGION 1..231: note = Variant of adenylate kinase
MHHHHHHGGSGMGAYLVFLGPPGAGKGTQGRRISAKTGIPHISTGDILRDIVAKQNDEVASKIKEIMEKGELVPDELGNAVVKRRLSEKDCEKGFILDGFPRTVRQAEYLDSFLESQNRQLTAAVLFKVPEDEVVQRLLSRLICPKCGRIYNMIFLPPKEDELCDDCGVGLVQRDDDKEETVRHRLKVYLEKTQPVIDYYSKKGILKRVDGSQGIDNVVAEVLGILGWSDK

SEQ ID NO: 875 - DNA, 693 bp, synthetic construct
  misc_feature 1..693: note = Variant of adenylate kinase
  source 1..693: mol_type = other DNA
atgcaccatcatcaccatcacgggggctccggcatgggggcatatctggtgttcttaggtccgccgggcgcgggaaaaggtacccaaggccgtcgcatttcggcaaagactggcatcccgcatattagcacgggcgatatcctgcgtgacatcgtcgctaagcaaaacgatgaagttgcctcgaaaattaaagagatcatggagaaaggtgaactcgttccagatgaactgggtaatgcggtagtaaaacgccgcctgtcggagaaagactgcgaaaaaggctttattttggatggtttcccgcgtaccgtgcgccaagcggaatatctggatagttttcttgaaagccagaatcgccagttgacagccgccgtgctgttcaaagtccccgaagatgaagttcgcctgcgtctgctgtctcgcctgatctgtccgaaatgcgggcgtatctacaacatgatttttctgccaccaaaagaagacgagctgtgtgacgattgcggtgtcggcttagtacagcgtgatgatgataaggaagaaacggtccgtcaccgcctgaaagtctaccttgagaagacccagccggtcattgactattatagtaagaaaggtattctcaaacgcgtagatgggtcgcaaggaatcgacaacgttgttgcagaagtcctggggattctgggttggagcgataag

SEQ ID NO: 876 - protein, 231 aa, synthetic construct
  REGION 1..231: note = Variant of adenylate kinase
MHHHHHHGGSGMGAYLVFLGPPGAGKGTQGRRISAKTGIPHISTGDILRDIVAKQNDEVASKIKEIMEKGELVPDELGNAVVKRRLSEKDCEKGFILDGFPRTVRQAEYLDSFLESQNRQLTAAVLFKVPEDEVRLRLLSRLICPKCGRIYNMIFLPPKEDELCDDCGVGLVQRDDDKEETVRHRLKVYLEKTQPVIDYYSKKGILKRVDGSQGIDNVVAEVLGILGWSDK

SEQ ID NO: 877 - DNA, 693 bp, synthetic construct
  misc_feature 1..693: note = Variant of adenylate kinase
  source 1..693: mol_type = other DNA
atgcaccatcatcaccatcacgggggctccggcatgggggcatatctggtgttcttaggtccgccgggcgcgggaaaaggtacccaaggccgtcgcatttcggcaaagactggcatcccgcatattagcacgggcgatatcctgcgtgacatcgtcgctaagcaaaacgatgaagttgcctcgaaaattaaagagttcatggagaaaggtgaactcgttccagatgaaatgggtaatgcggtagtaaaacgccgcctgtcggagaaagactgcgaaaaaggctttattttggatggtttcccgcgtaccgtgcgccaagcggaatatctggatagttttcttgaaagccagaatcgccagttgacagccgccgtgctgttcaaagtccccgaagatgaagttcgcctgcgtctgctgtctcgcctgatctgtccgaaatgccaccgtatctacaacatgatttttctgccaccaaaagaagacgagctgtgtgacgattgcggtgtcggcttagtacagcgtgatgatgataaggaagaaacggtccgtcaccgcctgaaagtctaccttgagaagacccagccggtcattgactattatagtaagaaaggtattctcaaacgcgtagatgggtcgcaaggaatcgacaacgttgtggcagaagtcctggggattctgggttggagcgataag

SEQ ID NO: 878 - protein, 231 aa, synthetic construct
  REGION 1..231: note = Variant of adenylate kinase
MHHHHHHGGSGMGAYLVFLGPPGAGKGTQGRRISAKTGIPHISTGDILRDIVAKQNDEVASKIKEFMEKGELVPDEMGNAVVKRRLSEKDCEKGFILDGFPRTVRQAEYLDSFLESQNRQLTAAVLFKVPEDEVRLRLLSRLICPKCHRIYNMIFLPPKEDELCDDCGVGLVQRDDDKEETVRHRLKVYLEKTQPVIDYYSKKGILKRVDGSQGIDNVVAEVLGILGWSDK

SEQ ID NO: 879 - DNA, 693 bp, synthetic construct
  misc_feature 1..693: note = Variant of adenylate kinase
  source 1..693: mol_type = other DNA
atgcaccatcatcaccatcacgggggctccggcatgggggcatatctggtgttcttaggtccgccgggcgcgggaaaaggtacccaaggccgtcgcatttcggcaaagactggcatcccgcatattagcacgggcgatatcctgcgtgacatcgtcgctaagcaaaacgatgaagttgcctcgaaaattaaagagatcatggagaaaggtgaactcgttccagatgaactgggtaatgcggtagtaaaacgccgcctgtcggagaaagactgcgaaaaaggctttattttggatggtttcccgcgtaccgtgcgccaagcggaatatctggatagttttcttgaaagccagaatcgccagttgacagccgccgtgctgttcaaagtccccgaagatgaagttgttctgcgtctgctgtctcgcctgatctgtccgaaatgcggtcgtatctacaacatgatttttctgccaccaaaagaagacgagctgtgtgacgattgcggtgtcggcttagtacagcgtgatgatgataaggaagaaacggtccgtcaccgcctgaaagtctaccttgagaagacccagccggtcattgactattatagtaagaaaggtattctcaaacgcgtagatgggtcgcaaggaatcgacaacgttgtggcagaagtcctggggattctgggttggagcgataag

SEQ ID NO: 880 - protein, 231 aa, synthetic construct
  REGION 1..231: note = Variant of adenylate kinase
MHHHHHHGGSGMGAYLVFLGPPGAGKGTQGRRISAKTGIPHISTGDILRDIVAKQNDEVASKIKEIMEKGELVPDELGNAVVKRRLSEKDCEKGFILDGFPRTVRQAEYLDSFLESQNRQLTAAVLFKVPEDEVVLRLLSRLICPKCGRIYNMIFLPPKEDELCDDCGVGLVQRDDDKEETVRHRLKVYLEKTQPVIDYYSKKGILKRVDGSQGIDNVVAEVLGILGWSDK

SEQ ID NO: 881 - DNA, 693 bp, synthetic construct
  misc_feature 1..693: note = Variant of adenylate kinase
  source 1..693: mol_type = other DNA
atgcaccatcatcaccatcacgggggctccggcatgggggcatatctggtgttcttaggtccgccgggcgcgggaaaaggtacccaaggccgtcgcatttcggcaaagactggcatcccgcatattagcacgggcgatatcctgcgtgacatcgtcgctaagcaaaacgatgaagttgcctcgaaaattaaagagatcatggagaaaggtgaactcgttccagatgaactgggtaatgcggtagtaaaacgccgcctgtcggagaaagactgcgaaaaaggctttattttggatggttatccgcgtaccgtgcgccaagcggaatatctggatagttttcttgaaagccagaatcgccagttgacagccgccgtgctgttcaaagtccccgaagatgaagttcgccagcgtctgctgtctcgcctgatctgtccgaaatgcttccgtatctacaacatgatttttctgccaccaaaagaagacgagctgtgtgacgattgcggtgtcggcttagtacagcgtgatgatgataaggaagaaacggtccgtcaccgcctgaaagtctaccttgagaagacccagccggtcattgactattatagtaagaaaggtattctcaaacgcgtagatgggtcgcaaggaatcgacaacgttgttgcagaagtcctggggattctgggttggagcgataag

SEQ ID NO: 882 - protein, 231 aa, synthetic construct
  REGION 1..231: note = Variant of adenylate kinase
MHHHHHHGGSGMGAYLVFLGPPGAGKGTQGRRISAKTGIPHISTGDILRDIVAKQNDEVASKIKEIMEKGELVPDELGNAVVKRRLSEKDCEKGFILDGYPRTVRQAEYLDSFLESQNRQLTAAVLFKVPEDEVRQRLLSRLICPKCFRIYNMIFLPPKEDELCDDCGVGLVQRDDDKEETVRHRLKVYLEKTQPVIDYYSKKGILKRVDGSQGIDNVVAEVLGILGWSDK

SEQ ID NO: 883 - DNA, 693 bp, synthetic construct
  misc_feature 1..693: note = Variant of adenylate kinase
  source 1..693: mol_type = other DNA
atgcaccatcatcaccatcacgggggctccggcatgggggcatatctggtgttcttaggtccgccgggcgcgggaaaaggtacccaaggccgtcgcatttcggcaaagactggcatcccgcatattagcacgggcgatatcctgcgtgacatcgtcgctaagcaaaacgatgaagttgcctcgaaaattaaagagatcatggagaaaggtgaactcgttccagatgaactgggtaatgcggtagtaaaacgccgcctgtcggagaaagactgcgaaaaaggctttattttggatggttatccgcgtaccgtgcgccaagcggaatatctggatagttttcttgaaagccagaatcgccagttgacagccgccgtgctgttcaaagtccccgaagatgaagttgttcagcgtctgctgtctcgcctgatctgtccgaaatgcttccgtatctacaacatgatttttctgccaccaaaagaagacgagctgtgtgacgattgcggtgtcggcttagtacagcgtgatgatgataaggaagaaacggtccgtcaccgcctgaaagtctaccttgagaagacccagccggtcattgactattatagtaagaaaggtattctcaaacgcgtagatgggtcgcaaggaatcgacaacgttgtggcagaagtcctggggattctgggttggagcgataag

SEQ ID NO: 884 - protein, 231 aa, synthetic construct
  REGION 1..231: note = Variant of adenylate kinase
MHHHHHHGGSGMGAYLVFLGPPGAGKGTQGRRISAKTGIPHISTGDILRDIVAKQNDEVASKIKEIMEKGELVPDELGNAVVKRRLSEKDCEKGFILDGYPRTVRQAEYLDSFLESQNRQLTAAVLFKVPEDEVVQRLLSRLICPKCFRIYNMIFLPPKEDELCDDCGVGLVQRDDDKEETVRHRLKVYLEKTQPVIDYYSKKGILKRVDGSQGIDNVVAEVLGILGWSDK

SEQ ID NO: 885 - DNA, 693 bp, synthetic construct
  misc_feature 1..693: note = Variant of adenylate kinase
  source 1..693: mol_type = other DNA
atgcaccatcatcaccatcacgggggctccggcatgggggcatatctggtgttcttaggtccgccgggcgcgggaaaaggtacccaaggccgtcgcatttcggcaaagactggcatcccgcatattagcacgggcgatatcctgcgtgacatcgtcgctaagcaaaacgatgaagttgcctcgaaaattaaagagatcatggagaaaggtgaactcgttccagatgaactgggtaatgcggtagtaaaacgccgcctgtcggagaaagactgcgaaaaaggctttattttggatggttatccgcgtaccgtgcgccaagcggaatatctggatagttttcttgaaagccagaatcgccagttgacagccgccgtgctgttcaaagtccccgaagatgaagttgttctgcgtctgctgtctcgcctgatctgtccgaaatgcttccgtatctacaacatgatttttctgccaccaaaagaagacgagctgtgtgacgattgcggtgtcggcttagtacagcgtgatgatgataaggaagaaacggtccgtcaccgcctgaaagtctaccttgagaagacccagccggtcattgactattatagtaagaaaggtattctcaaacgcgtagatgggtcgcaaggaatcgacaacgttgttgcagaagtcctggggattctgggttggagcgataag

SEQ ID NO: 886 - protein, 231 aa, synthetic construct
  REGION 1..231: note = Variant of adenylate kinase
MHHHHHHGGSGMGAYLVFLGPPGAGKGTQGRRISAKTGIPHISTGDILRDIVAKQNDEVASKIKEIMEKGELVPDELGNAVVKRRLSEKDCEKGFILDGYPRTVRQAEYLDSFLESQNRQLTAAVLFKVPEDEVVLRLLSRLICPKCFRIYNMIFLPPKEDELCDDCGVGLVQRDDDKEETVRHRLKVYLEKTQPVIDYYSKKGILKRVDGSQGIDNVVAEVLGILGWSDK

SEQ ID NO: 887 - DNA, 693 bp, synthetic construct
  misc_feature 1..693: note = Variant of adenylate kinase
  source 1..693: mol_type = other DNA
atgcaccatcatcaccatcacgggggctccggcatgggggcatatctggtgttcttaggtccgccgggcgcgggaaaaggtacccaaggccgtcgcatttcggcaaagactggcatcccgcatattagcacgggcgatatcctgcgtgacatcgtcgctaagcaaaacgatgaagttgcctcgaaaattaaagagatcatggagaaaggtgaactcgttccagatgaactgggtaatgcggtagtaaaacgccgcctgtcggagaaagactgcgaaaaaggctttattttggatggttatccgcgtaccgtgcgccaagcggaatatctggatagttttcttgaaagccagaatcgccagttgacagccgccgtgctgttcaaagtccccgaagatgaagttcgccagcgtctgctgtctcgcctgatctgtccgaaatgcgggcgtatctacaacatgatttttctgccaccaaaagaagacgagctgtgtgacgattgcggtgtcggcttagtacagcgtgatgatgataaggaagaaacggtccgtcaccgcctgaaagtctaccttgagaagacccagccggtcattgactattatagtaagaaaggtattctcaaacgcgtagatgggtcgcaaggaatcgacaacgttgtggcagaagtcctggggattctgggttggagcgataag

SEQ ID NO: 888 - protein, 231 aa, synthetic construct
  REGION 1..231: note = Variant of adenylate kinase
MHHHHHHGGSGMGAYLVFLGPPGAGKGTQGRRISAKTGIPHISTGDILRDIVAKQNDEVASKIKEIMEKGELVPDELGNAVVKRRLSEKDCEKGFILDGYPRTVRQAEYLDSFLESQNRQLTAAVLFKVPEDEVRQRLLSRLICPKCGRIYNMIFLPPKEDELCDDCGVGLVQRDDDKEETVRHRLKVYLEKTQPVIDYYSKKGILKRVDGSQGIDNVVAEVLGILGWSDK

SEQ ID NO: 889 - DNA, 693 bp, synthetic construct
  misc_feature 1..693: note = Variant of adenylate kinase
  source 1..693: mol_type = other DNA
atgcaccatcatcaccatcacgggggctccggcatgggggcatatctggtgttcttaggtccgccgggcgcgggaaaaggtacccaaggccgtcgcatttcggcaaagactggcatcccgcatattagcacgggcgatatcctgcgtgacatcgtcgctaagcaaaacgatgaagttgcctcgaaaattaaagagatcatggagaaaggtgaactcgttccagatgaactgggtaatgcggtagtaaaacgccgcctgtcggagaaagactgcgaaaaaggctttattttggatggttatccgcgtaccgtgcgccaagcggaatatctggatagttttcttgaaagccagaatcgccagttgacagccgccgtgctgttcaaagtccccgaagatgaagttcgcctgcgtctgctgtctcgcctgatctgtccgaaatgcggtcgtatctacaacatgatttttctgccaccaaaagaagacgagctgtgtgacgattgcggtgtcggcttagtacagcgtgatgatgataaggaagaaacggtccgtcaccgcctgaaagtctaccttgagaagacccagccggtcattgactattatagtaagaaaggtattctcaaacgcgtagatgggtcgcaaggaatcgacaacgttgttgcagaagtcctggggattctgggttggagcgataag

SEQ ID NO: 890 - protein, 231 aa, synthetic construct
  REGION 1..231: note = Variant of adenylate kinase
MHHHHHHGGSGMGAYLVFLGPPGAGKGTQGRRISAKTGIPHISTGDILRDIVAKQNDEVASKIKEIMEKGELVPDELGNAVVKRRLSEKDCEKGFILDGYPRTVRQAEYLDSFLESQNRQLTAAVLFKVPEDEVRLRLLSRLICPKCGRIYNMIFLPPKEDELCDDCGVGLVQRDDDKEETVRHRLKVYLEKTQPVIDYYSKKGILKRVDGSQGIDNVVAEVLGILGWSDK

SEQ ID NO: 891 - DNA, 693 bp, synthetic construct
  misc_feature 1..693: note = Variant of adenylate kinase
  source 1..693: mol_type = other DNA
atgcaccatcatcaccatcacgggggctccggcatgggggcatatctggtgttcttaggtccgccgggcgcgggaaaaggtacccaaggccgtcgcatttcggcaaagactggcatcccgcatattagcacgggcgatatctttcgtgacatcgtcgctaagcaaaacgatgaagttgcctcgaaaattaaagagttcatggagaaaggtgaactcgttccagatgaactgggtaatgcggtagtaaaacgccgcctgtcggagaaagactgcgaaaaaggctttattttggatggtttcccgcgtaccgtgcgccaagcggaatatctggatagttttcttgaaagccagaatcgccagttgacagccgccgtgctgttcaaagtccccgaagatgaagttgttcagcgtctgctgtctcgcctgatctgtccgaaatgcgggcgtatctacaacatgatttttctgccaccaaaagaagacgagctgtgtgacgattgcggtgtcggcttagtacagcgtgatgatgataaggaagaaacggtccgtcaccgcctgaaagtctaccttgagaagacccagccggtcattgactattatagtaagaaaggtattctcaaacgcgtagatgggtcgcaaggaatcgacaacgttgttgcagaagtcctggggattctgggttggagcgataag

SEQ ID NO: 892 - protein, 231 aa, synthetic construct
  REGION 1..231: note = Variant of adenylate kinase
MHHHHHHGGSGMGAYLVFLGPPGAGKGTQGRRISAKTGIPHISTGDIFRDIVAKQNDEVASKIKEFMEKGELVPDELGNAVVKRRLSEKDCEKGFILDGFPRTVRQAEYLDSFLESQNRQLTAAVLFKVPEDEVVQRLLSRLICPKCGRIYNMIFLPPKEDELCDDCGVGLVQRDDDKEETVRHRLKVYLEKTQPVIDYYSKKGILKRVDGSQGIDNVVAEVLGILGWSDK

SEQ ID NO: 893 - DNA, 693 bp, synthetic construct
  misc_feature 1..693: note = Variant of adenylate kinase
  source 1..693: mol_type = other DNA
atgcaccatcatcaccatcacgggggctccggcatgggggcatatctggtgttcttaggtccgccgggcgcgggaaaaggtacccaaggccgtcgcatttcggcaaagactggcatcccgcatattagcacgggcgatatcctgcgtgacatcgtcgctaagcaaaacgatgaagttgcctcgaaaattaaagagcaaatggagaaaggtgaactcgttccagatgaactgggtaatgcggtagtaaaacgccgcctgtcggagaaagactgcgaaaaaggctttattttggatggttatccgcgtaccgtgcgccaagcggaatatctggatagttttcttgaaagccagaatcgccagttgacagccgccgtgctgttcaaagtccccgaagatgaagttgttcagcgtctgctgtctcgcctgatctgtccgaaatgcgggcgtatctacaacatgatttttctgccaccaaaagaagacgagctgtgtgacgattgcggtgtcggcttagtacagcgtgatgatgataaggaagaaacggtccgtcaccgcctgaaagtctaccttgagaagacccagccggtcattgactattatagtaagaaaggtattctcaaacgcgtagatgggtcgcaaggaatcgacaacgttctggcagaagtcctggggattctgggttggagcgataag

SEQ ID NO: 894 - protein, 231 aa, synthetic construct
  REGION 1..231: note = Variant of adenylate kinase
MHHHHHHGGSGMGAYLVFLGPPGAGKGTQGRRISAKTGIPHISTGDILRDIVAKQNDEVASKIKEQMEKGELVPDELGNAVVKRRLSEKDCEKGFILDGYPRTVRQAEYLDSFLESQNRQLTAAVLFKVPEDEVVQRLLSRLICPKCGRIYNMIFLPPKEDELCDDCGVGLVQRDDDKEETVRHRLKVYLEKTQPVIDYYSKKGILKRVDGSQGIDNVLAEVLGILGWSDK

SEQ ID NO: 895 - DNA, 693 bp, synthetic construct
  misc_feature 1..693: note = Variant of adenylate kinase
  source 1..693: mol_type = other DNA
atgcaccatcatcaccatcacgggggctccggcatgggggcatatctggtgttcttaggtccgccgggcgcgggaaaaggtacccaaggccgtcgcatttcggcaaagactggcatcccgcatattagcacgggcgatatcctgcgtgacatcgtcgctaagcaaaacgatgaagttgcctcgaaaattaaagagatcatggagaaaggtgaactcgttccagatgaactgggtaatgcggtagtaaaacgccgcctgtcggagaaagactgcgaaaaaggctttattttggatggttatccgcgtaccgtgcgccaagcggaatatctggatagttttcttgaaagccagaatcgccagttgacagccgccgtgctgttcaaagtccccgaagatgaagttcgccagcgtctgctgtctcgcctgatctgtccgaaatgcgggcgtatctacaacatgatttttctgccaccaaaagaagacgagctgtgtgacgattgcggtgtcggcttagtacagcgtgatgatgataaggaagaaacggtccgtcaccgcctgaaagtctaccttgagaagacccagccggtcattgactattatagtaagaaaggtattctcaaacgcgtagatgggtcgcaaggaatcgacaacgttctggcagaagtcctggggattctgggttggagcgataag

SEQ ID NO: 896 - protein, 231 aa, synthetic construct
  REGION 1..231: note = Variant of adenylate kinase
MHHHHHHGGSGMGAYLVFLGPPGAGKGTQGRRISAKTGIPHISTGDILRDIVAKQNDEVASKIKEIMEKGELVPDELGNAVVKRRLSEKDCEKGFILDGYPRTVRQAEYLDSFLESQNRQLTAAVLFKVPEDEVRQRLLSRLICPKCGRIYNMIFLPPKEDELCDDCGVGLVQRDDDKEETVRHRLKVYLEKTQPVIDYYSKKGILKRVDGSQGIDNVLAEVLGILGWSDK

SEQ ID NO: 897 - DNA, 693 bp, synthetic construct
  misc_feature 1..693: note = Variant of adenylate kinase
  source 1..693: mol_type = other DNA
atgcaccatcatcaccatcacgggggctccggcatgggggcatatctggtgttcttaggtccgccgggcgcgggaaaaggtacccaaggccgtcgcatttcggcaaagactggcatcccgcatattagcacgggcgatatctttcgtgacatcgtcgctaagcaaaacgatgaagttgcctcgaaaattaaagagatcatggagaaaggtgaactcgttccagatgaactgggtaatgcggtagtaaaacgccgcctgtcggagaaagactgcgaaaaaggctttattttggatggtttcccgcgtaccgtgcgccaagcggaatatctggatagttttcttgaaagccagaatcgccagttgacagccgccgtgctgttcaaagtccccgaagatgaagttgttcagcgtctgctgtctcgcctgatctgtccgaaatgccaccgtatctacaacatgatttttctgccaccaaaagaagacgagctgtgtgacgattgcggtgtcggcttagtacagcgtgatgatgataaggaagaaacggtccgtcaccgcctgaaagtctaccttgagaagacccagccggtcattgactattatagtaagaaaggtattctcaaacgcgtagatgggtcgcaaggaatcgacaacgttgtggcagaagtcctggggattctgggttggagcgataag

SEQ ID NO: 898 - protein, 231 aa, synthetic construct
  REGION 1..231: note = Variant of adenylate kinase
MHHHHHHGGSGMGAYLVFLGPPGAGKGTQGRRISAKTGIPHISTGDIFRDIVAKQNDEVASKIKEIMEKGELVPDELGNAVVKRRLSEKDCEKGFILDGFPRTVRQAEYLDSFLESQNRQLTAAVLFKVPEDEVVQRLLSRLICPKCHRIYNMIFLPPKEDELCDDCGVGLVQRDDDKEETVRHRLKVYLEKTQPVIDYYSKKGILKRVDGSQGIDNVVAEVLGILGWSDK

SEQ ID NO: 899 - DNA, 693 bp, synthetic construct
  misc_feature 1..693: note = Variant of adenylate kinase
  source 1..693: mol_type = other DNA
atgcaccatcatcaccatcacgggggctccggcatgggggcatatctggtgttcttaggtccgccgggcgcgggaaaaggtacccaaggccgtcgcatttcggcaaagactggcatcccgcatattagcacgggcgatatcctgcgtgacatcgtcgctaagcaaaacgatgaagttgcctcgaaaattaaagagatcatggagaaaggtgaactcgttccagatgaactgggtaatgcggtagtaaaacgccgcctgtcggagaaagactgcgaaaaaggctttattttggatggttatccgcgtaccgtgcgccaagcggaatatctggatagttttcttgaaagccagaatcgccagttgacagccgccgtgctgttcaaagtccccgaagatgaagttgttctgcgtctgctgtctcgcctgatctgtccgaaatgcgggcgtatctacaacatgatttttctgccaccaaaagaagacgagctgtgtgacgattgcggtgtcggcttagtacagcgtgatgatgataaggaagaaacggtccgtcaccgcctgaaagtctaccttgagaagacccagccggtcattgactattatagtaagaaaggtattctcaaacgcgtagatgggtcgcaaggaatcgacaacgttctggcagaagtcctggggattctgggttggagcgataag

SEQ ID NO: 900 - protein, 231 aa, synthetic construct
  REGION 1..231: note = Variant of adenylate kinase
MHHHHHHGGSGMGAYLVFLGPPGAGKGTQGRRISAKTGIPHISTGDILRDIVAKQNDEVASKIKEIMEKGELVPDELGNAVVKRRLSEKDCEKGFILDGYPRTVRQAEYLDSFLESQNRQLTAAVLFKVPEDEVVLRLLSRLICPKCGRIYNMIFLPPKEDELCDDCGVGLVQRDDDKEETVRHRLKVYLEKTQPVIDYYSKKGILKRVDGSQGIDNVLAEVLGILGWSDK

SEQ ID NO: 901 - DNA, 693 bp, synthetic construct
  misc_feature 1..693: note = Variant of adenylate kinase
  source 1..693: mol_type = other DNA
atgcaccatcatcaccatcacgggggctccggcatgggggcatatctggtgttcttaggtccgccgggcgcgggaaaaggtacccaaggccgtcgcatttcggcaaagactggcatcccgcatattagcacgggcgatatcctgcgtgacatcgtcgctaagcaaaacgatgaagttgcctcgaaaattaaagagatcatggagaaaggtgaactcgttccagatgaactgggtaatgcggtagtaaaacgccgcctgtcggagaaagactgcgaaaaaggctttattttggatggttatccgcgtaccgtgcgccaagcggaatatctggatagttttcttgaaagccagaatcgccagttgacagccgccgtgctgttcaaagtccccgaagatgaagttgttcagcgtctgctgtctcgcctgatctgtccgaaatgcgggcgtatctacaacatgatttttctgccaccaaaagaagacgagctgtgtgacgattgcggtgtcggcttagtacagcgtgatgatgataaggaagaaacggtccgtcaccgcctgaaagtctaccttgagaagacccagccggtcattgactattatagtaagaaaggtattctcaaacgcgtagatgggtcgcaaggaatcgacaacgttctggcagaagtcctggggattctgggttggagcgataag

SEQ ID NO: 902 - protein, 231 aa, synthetic construct
  REGION 1..231: note = Variant of adenylate kinase
MHHHHHHGGSGMGAYLVFLGPPGAGKGTQGRRISAKTGIPHISTGDILRDIVAKQNDEVASKIKEIMEKGELVPDELGNAVVKRRLSEKDCEKGFILDGYPRTVRQAEYLDSFLESQNRQLTAAVLFKVPEDEVVQRLLSRLICPKCGRIYNMIFLPPKEDELCDDCGVGLVQRDDDKEETVRHRLKVYLEKTQPVIDYYSKKGILKRVDGSQGIDNVLAEVLGILGWSDK

SEQ ID NO: 903 - DNA, 693 bp, synthetic construct
  misc_feature 1..693: note = Variant of adenylate kinase
  source 1..693: mol_type = other DNA
atgcaccatcatcaccatcacgggggctccggcatgggggcatatctggtgttcttaggtccgccgggcgcgggaaaaggtacccaaggccgtcgcatttcggcaaagactggcatcccgcatattagcacgggcgatatcctgcgtgacatcgtcgctaagcaaaacgatgaagttgcctcgaaaattaaagagatcatggagaaaggtgaactcgttccagatgaactgggtaatgcggtagtaaaacgccgcctgtcggagaaagactgcgaaaaaggctttattttggatggttatccgcgtaccgtgcgccaagcggaatatctggatagttttcttgaaagccagaatcgccagttgacagccgccgtgctgttcaaagtccccgaagatgaagttcgccagcgtctgctgtctcgcctgatctgtccgaaatgcttccgtatctacaacatgatttttctgccaccaaaagaagacgagctgtgtgacgattgcggtgtcggcttagtacagcgtgatgatgataaggaagaaacggtccgtcaccgcctgaaagtctaccttgagaagacccagccggtcattgactattatagtaagaaaggtattctcaaacgcgtagatgggtcgcaaggaatcgacaacgttctggcagaagtcctggggattctgggttggagcgataag

SEQ ID NO: 904 - protein, 231 aa, synthetic construct
  REGION 1..231: note = Variant of adenylate kinase
MHHHHHHGGSGMGAYLVFLGPPGAGKGTQGRRISAKTGIPHISTGDILRDIVAKQNDEVASKIKEIMEKGELVPDELGNAVVKRRLSEKDCEKGFILDGYPRTVRQAEYLDSFLESQNRQLTAAVLFKVPEDEVRQRLLSRLICPKCFRIYNMIFLPPKEDELCDDCGVGLVQRDDDKEETVRHRLKVYLEKTQPVIDYYSKKGILKRVDGSQGIDNVLAEVLGILGWSDK

SEQ ID NO: 905 - DNA, 693 bp, synthetic construct
  misc_feature 1..693: note = Variant of adenylate kinase
  source 1..693: mol_type = other DNA
atgcaccatcatcaccatcacgggggctccggcatgggggcatatctggtgttcttaggtccgccgggcgcgggaaaaggtacccaaggccgtcgcatttcggcaaagactggcatcccgcatattagcacgggcgatatctttcgtgacatcgtcgctaagcaaaacgatgaagttgcctcgaaaattaaagagatcatggagaaaggtgaactcgttccagatgaactgggtaatgcggtagtaaaacgccgcctgtcggagaaagactgcgaaaaaggctttattttggatggtttcccgcgtaccgtgcgccaagcggaatatctggatagttttcttgaaagccagaatcgccagttgacagccgccgtgctgttcaaagtccccgaagatgaagttcgcctgcgtctgctgtctcgcctgatctgtccgaaatgcgggcgtatctacaacatgatttttctgccaccaaaagaagacgagctgtgtgacgattgcggtgtcggcttagtacagcgtgatgatgataaggaagaaacggtccgtcaccgcctgaaagtctaccttgagaagacccagccggtcattgactattatagtaagaaaggtattctcaaacgcgtagatgggtcgcaaggaatcgacaacgttgttgcagaagtcctggggattctgggttggagcgataag

SEQ ID NO: 906 - protein, 231 aa, synthetic construct
  REGION 1..231: note = Variant of adenylate kinase
MHHHHHHGGSGMGAYLVFLGPPGAGKGTQGRRISAKTGIPHISTGDIFRDIVAKQNDEVASKIKEIMEKGELVPDELGNAVVKRRLSEKDCEKGFILDGFPRTVRQAEYLDSFLESQNRQLTAAVLFKVPEDEVRLRLLSRLICPKCGRIYNMIFLPPKEDELCDDCGVGLVQRDDDKEETVRHRLKVYLEKTQPVIDYYSKKGILKRVDGSQGIDNVVAEVLGILGWSDK

SEQ ID NO: 907 - DNA, 693 bp, synthetic construct
  misc_feature 1..693: note = Variant of adenylate kinase
  source 1..693: mol_type = other DNA
atgcaccatcatcaccatcacgggggctccggcatgggggcatatctggtgttcttaggtccgccgggcgcgggaaaaggtacccaaggccgtcgcatttcggcaaagactggcatcccgcatattagcacgggcgatatctttcgtgacatcgtcgctaagcaaaacgatgaagttgcctcgaaaattaaagagatcatggagaaaggtgaactcgttccagatgaactgggtaatgcggtagtaaaacgccgcctgtcggagaaagactgcgaaaaaggctttattttggatggtttcccgcgtaccgtgcgccaagcggaatatctggatagttttcttgaaagccagaatcgccagttgacagccgccgtgctgttcaaagtccccgaagatgaagttgttctgcgtctgctgtctcgcctgatctgtccgaaatgcgggcgtatctacaacatgatttttctgccaccaaaagaagacgagctgtgtgacgattgcggtgtcggcttagtacagcgtgatgatgataaggaagaaacggtccgtcaccgcctgaaagtctaccttgagaagacccagccggtcattgactattatagtaagaaaggtattctcaaacgcgtagatgggtcgcaaggaatcgacaacgttgttgcagaagtcctggggattctgggttggagcgataag

SEQ ID NO: 908 - protein, 231 aa, synthetic construct
  REGION 1..231: note = Variant of adenylate kinase
MHHHHHHGGSGMGAYLVFLGPPGAGKGTQGRRISAKTGIPHISTGDIFRDIVAKQNDEVASKIKEIMEKGELVPDELGNAVVKRRLSEKDCEKGFILDGFPRTVRQAEYLDSFLESQNRQLTAAVLFKVPEDEVVLRLLSRLICPKCGRIYNMIFLPPKEDELCDDCGVGLVQRDDDKEETVRHRLKVYLEKTQPVIDYYSKKGILKRVDGSQGIDNVVAEVLGILGWSDK

SEQ ID NO: 909 - DNA, 693 bp, synthetic construct
  misc_feature 1..693: note = Variant of adenylate kinase
  source 1..693: mol_type = other DNA
atgcaccatcatcaccatcacgggggctccggcatgggggcatatctggtgttcttaggtccgccgggcgcgggaaaaggtacccaaggccgtcgcatttcggcaaagactggcatcccgcatattagcacgggcgatatctttcgtgacatcgtcgctaagcaaaacgatgaagttgcctcgaaaattaaagagttcatggagaaaggtgaactcgttccagatgaaatgggtaatgcggtagtaaaacgccgcctgtcggagaaagactgcgaaaaaggctttattttggatggtttcccgcgtaccgtgcgccaagcggaatatctggatagttttcttgaaagccagaatcgccagttgacagccgccgtgctgttcaaagtccccgaagatgaagttgttctgcgtctgctgtctcgcctgatctgtccgaaatgcggtcgtatctacaacatgatttttctgccaccaaaagaagacgagctgtgtgacgattgcggtgtcggcttagtacagcgtgatgatgataaggaagaaacggtccgtcaccgcctgaaagtctaccttgagaagacccagccggtcattgactattatagtaagaaaggtattctcaaacgcgtagatgggtcgcaaggaatcgacaacgttctggcagaagtcctggggattctgggttggagcgataag

SEQ ID NO: 910 - protein, 231 aa, synthetic construct
  REGION 1..231: note = Variant of adenylate kinase
MHHHHHHGGSGMGAYLVFLGPPGAGKGTQGRRISAKTGIPHISTGDIFRDIVAKQNDEVASKIKEFMEKGELVPDEMGNAVVKRRLSEKDCEKGFILDGFPRTVRQAEYLDSFLESQNRQLTAAVLFKVPEDEVVLRLLSRLICPKCGRIYNMIFLPPKEDELCDDCGVGLVQRDDDKEETVRHRLKVYLEKTQPVIDYYSKKGILKRVDGSQGIDNVLAEVLGILGWSDK

SEQ ID NO: 911 - DNA, 693 bp, synthetic construct
  misc_feature 1..693: note = Variant of adenylate kinase
  source 1..693: mol_type = other DNA
atgcaccatcatcaccatcacgggggctccggcatgggggcatatctggtgttcttaggtccgccgggcgcgggaaaaggtacccaaggccgtcgcatttcggcaaagactggcatcccgcatattagcacgggcgatatcttccgtgacatcgtcgctaagcaaaacgatgaagttgcctcgaaaattaaagagatcatggagaaaggtgaactcgttccagatgaactgggtaatgcggtagtaaaacgccgcctgtcggagaaagactgcgaaaaaggctttattttggatggtttcccgcgtaccgtgcgccaagcggaatatctggatagttttcttgaaagccagaatcgccagttgacagccgccgtgctgttcaaagtccccgaagatgaagttcgccagcgtctgctgtctcgcctgatctgtccgaaatgcgggcgtatctacaacatgatttttctgccaccaaaagaagacgagctgtgtgacgattgcggtgtcggcttagtacagcgtgatgatgataaggaagaaacggtccgtcaccgcctgaaagtctaccttgagaagacccagccggtcattgactattatagtaagaaaggtattctcaaacgcgtagatgggtcgcaaggaatcgacaacgttgtggcagaagtcctggggattctgggttggagcgataag

SEQ ID NO: 912 - protein, 231 aa, synthetic construct
  REGION 1..231: note = Variant of adenylate kinase
MHHHHHHGGSGMGAYLVFLGPPGAGKGTQGRRISAKTGIPHISTGDIFRDIVAKQNDEVASKIKEIMEKGELVPDELGNAVVKRRLSEKDCEKGFILDGFPRTVRQAEYLDSFLESQNRQLTAAVLFKVPEDEVRQRLLSRLICPKCGRIYNMIFLPPKEDELCDDCGVGLVQRDDDKEETVRHRLKVYLEKTQPVIDYYSKKGILKRVDGSQGIDNVVAEVLGILGWSDK

SEQ ID NO: 913 - DNA, 693 bp, synthetic construct
  misc_feature 1..693: note = Variant of adenylate kinase
  source 1..693: mol_type = other DNA
atgcaccatcatcaccatcacgggggctccggcatgggggcatatctggtgttcttaggtccgccgggcgcgggaaaaggtacccaaggccgtcgcatttcggcaaagactggcatcccgcatattagcacgggcgatatcctgcgtgacatcgtcgctaagcaaaacgatgaagttgcctcgaaaattaaagagatcatggagaaaggtgaactcgttccagatgaaatgggtaatgcggtagtaaaacgccgcctgtcggagaaagactgcgaaaaaggctttattttggatggtttcccgcgtaccgtgcgccaagcggaatatctggatagttttcttgaaagccagaatcgccagttgacagccgccgtgctgttcaaagtccccgaagatgaagttcgcctgcgtctgctgtctcgcctgatctgtccgaaatgcgggcgtatctacaacatgatttttctgccaccaaaagaagacgagctgtgtgacgattgcggtgtcggcttagtacagcgtgatgatgataaggaagaaacggtccgtcaccgcctgaaagtctaccttgagaagacccagccggtcattgactattatagtaagaaaggtattctcaaacgcgtagatgggtcgcaaggaatcgacaacgttgtggcagaagtcctggggattctgggttggagcgataag

SEQ ID NO: 914 - protein, 231 aa, synthetic construct
  REGION 1..231: note = Variant of adenylate kinase
MHHHHHHGGSGMGAYLVFLGPPGAGKGTQGRRISAKTGIPHISTGDILRDIVAKQNDEVASKIKEIMEKGELVPDEMGNAVVKRRLSEKDCEKGFILDGFPRTVRQAEYLDSFLESQNRQLTAAVLFKVPEDEVRLRLLSRLICPKCGRIYNMIFLPPKEDELCDDCGVGLVQRDDDKEETVRHRLKVYLEKTQPVIDYYSKKGILKRVDGSQGIDNVVAEVLGILGWSDK

SEQ ID NO: 915 - DNA, 693 bp, synthetic construct
  misc_feature 1..693: note = Variant of adenylate kinase
  source 1..693: mol_type = other DNA
atgcaccatcatcaccatcacgggggctccggcatgggggcatatctggtgttcttaggtccgccgggcgcgggaaaaggtacccaaggccgtcgcatttcggcaaagactggcatcccgcatattagcacgggcgatatctttcgtgacatcgtcgctaagcaaaacgatgaagttgcctcgaaaattaaagagatcatggagaaaggtgaactcgttccagatgaactgggtaatgcggtagtaaaacgccgcctgtcggagaaagactgcgaaaaaggctttattttggatggtttcccgcgtaccgtgcgccaagcggaatatctggatagttttcttgaaagccagaatcgccagttgacagccgccgtgctgttcaaagtccccgaagatgaagttgttcagcgtctgctgtctcgcctgatctgtccgaaatgcgggcgtatctacaacatgatttttctgccaccaaaagaagacgagctgtgtgacgattgcggtgtcggcttagtacagcgtgatgatgataaggaagaaacggtccgtcaccgcctgaaagtctaccttgagaagacccagccggtcattgactattatagtaagaaaggtattctcaaacgcgtagatgggtcgcaaggaatcgacaacgttgtggcagaagtcctggggattctgggttggagcgataag

SEQ ID NO: 916 - protein, 231 aa, synthetic construct
  REGION 1..231: note = Variant of adenylate kinase
MHHHHHHGGSGMGAYLVFLGPPGAGKGTQGRRISAKTGIPHISTGDIFRDIVAKQNDEVASKIKEIMEKGELVPDELGNAVVKRRLSEKDCEKGFILDGFPRTVRQAEYLDSFLESQNRQLTAAVLFKVPEDEVVQRLLSRLICPKCGRIYNMIFLPPKEDELCDDCGVGLVQRDDDKEETVRHRLKVYLEKTQPVIDYYSKKGILKRVDGSQGIDNVVAEVLGILGWSDK

SEQ ID NO: 917 - DNA, 693 bp, synthetic construct
  misc_feature 1..693: note = Variant of adenylate kinase
  source 1..693: mol_type = other DNA
atgcaccatcatcaccatcacgggggctccggcatgggggcatatctggtgttcttaggtccgccgggcgcgggaaaaggtacccaaggccgtcgcatttcggcaaagactggcatcccgcatattagcacgggcgatatcttccgtgacatcgtcgctaagcaaaacgatgaagttgcctcgaaaattaaagagatcatggagaaaggtgaactcgttccagatgaaatgggtaatgcggtagtaaaacgccgcctgtcggagaaagactgcgaaaaaggctttattttggatggtttcccgcgtaccgtgcgccaagcggaatatctggatagttttcttgaaagccagaatcgccagttgacagccgccgtgctgttcaaagtccccgaagatgaagttcgccagcgtctgctgtctcgcctgatctgtccgaaatgcggtcgtatctacaacatgatttttctgccaccaaaagaagacgagctgtgtgacgattgcggtgtcggcttagtacagcgtgatgatgataaggaagaaacggtccgtcaccgcctgaaagtctaccttgagaagacccagccggtcattgactattatagtaagaaaggtattctcaaacgcgtagatgggtcgcaaggaatcgacaacgttgtggcagaagtcctggggattctgggttggagcgataag

SEQ ID NO: 918 - protein, 231 aa, synthetic construct
  REGION 1..231: note = Variant of adenylate kinase
MHHHHHHGGSGMGAYLVFLGPPGAGKGTQGRRISAKTGIPHISTGDIFRDIVAKQNDEVASKIKEIMEKGELVPDEMGNAVVKRRLSEKDCEKGFILDGFPRTVRQAEYLDSFLESQNRQLTAAVLFKVPEDEVRQRLLSRLICPKCGRIYNMIFLPPKEDELCDDCGVGLVQRDDDKEETVRHRLKVYLEKTQPVIDYYSKKGILKRVDGSQGIDNVVAEVLGILGWSDK

SEQ ID NO: 919 - DNA, 693 bp, synthetic construct
  misc_feature 1..693: note = Variant of adenylate kinase
  source 1..693: mol_type = other DNA
atgcaccatcatcaccatcacgggggctccggcatgggggcatatctggtgttcttaggtccgccgggcgcgggaaaaggtacccaaggccgtcgcatttcggcaaagactggcatcccgcatattagcacgggcgatatcctgcgtgacatcgtcgctaagcaaaacgatgaagttgcctcgaaaattaaagagttcatggagaaaggtgaactcgttccagatgaactgggtaatgcggtagtaaaacgccgcctgtcggagaaagactgcgaaaaaggctttattttggatggtttcccgcgtaccgtgcgccaagcggaatatctggatagttttcttgaaagccagaatcgccagttgacagccgccgtgctgttcaaagtccccgaagatgaagttcgcctgcgtctgctgtctcgcctgatctgtccgaaatgcttccgtatctacaacatgatttttctgccaccaaaagaagacgagctgtgtgacgattgcggtgtcggcttagtacagcgtgatgatgataaggaagaaacggtccgtcaccgcctgaaagtctaccttgagaagacccagccggtcattgactattatagtaagaaaggtattctcaaacgcgtagatgggtcgcaaggaatcgacaacgttctggcagaagtcctggggattctgggttggagcgataag

SEQ ID NO: 920 - protein, 231 aa, synthetic construct
  REGION 1..231: note = Variant of adenylate kinase
MHHHHHHGGSGMGAYLVFLGPPGAGKGTQGRRISAKTGIPHISTGDILRDIVAKQNDEVASKIKEFMEKGELVPDELGNAVVKRRLSEKDCEKGFILDGFPRTVRQAEYLDSFLESQNRQLTAAVLFKVPEDEVRLRLLSRLICPKCFRIYNMIFLPPKEDELCDDCGVGLVQRDDDKEETVRHRLKVYLEKTQPVIDYYSKKGILKRVDGSQGIDNVLAEVLGILGWSDK

SEQ ID NO: 921 - DNA, 693 bp, synthetic construct
  misc_feature 1..693: note = Variant of adenylate kinase
  source 1..693: mol_type = other DNA
atgcaccatcatcaccatcacgggggctccggcatgggggcatatctggtgttcttaggtccgccgggcgcgggaaaaggtacccaaggccgtcgcatttcggcaaagactggcatcccgcatattagcacgggcgatatcttccgtgacatcgcagctaagcaaaacgatgaagttgcctcgaaaattaaagagatcatggagaaaggtgaactcgttccagatgaactgggtaatgcggtagtaaaacgccgcctgtcggagaaagactgcgaaaaaggctttattttggatggttatccgcgtaccgtgcgccaagcggaatatctggatagttttcttgaaagccagaatcgccagttgacagccgccgtgctgttcaaagtccccgaagatgaagttgttcagcgtctgctgtctcgcctgatctgtccgaaatgcgggcgtatctacaacatgatttttctgccaccaaaagaagacgagctgtgtgacgattgcggtgtcggcttagtacagcgtgatgatgataaggaagaaacggtccgtattcgcctgaaagtctaccttgagaagacccagccggtcattgactattatagtaagaaaggtattctcaaacgcgtagatgggtcgcaaggaatcgacaacgttgttgcagaagtcctggggattctgggttggagcgataag

SEQ ID NO: 922 - protein, 231 aa, synthetic construct
  REGION 1..231: note = Variant of adenylate kinase
MHHHHHHGGSGMGAYLVFLGPPGAGKGTQGRRISAKTGIPHISTGDIFRDIAAKQNDEVASKIKEIMEKGELVPDELGNAVVKRRLSEKDCEKGFILDGYPRTVRQAEYLDSFLESQNRQLTAAVLFKVPEDEVVQRLLSRLICPKCGRIYNMIFLPPKEDELCDDCGVGLVQRDDDKEETVRIRLKVYLEKTQPVIDYYSKKGILKRVDGSQGIDNVVAEVLGILGWSDK

SEQ ID NO: 923 - DNA, 693 bp, synthetic construct
  misc_feature 1..693: note = Variant of adenylate kinase
  source 1..693: mol_type = other DNA
atgcaccatcatcaccatcacgggggctccggcatgggggcatatctggtgttcttaggtccgccgggcgcgggaaaaggtacccaaggccgtcgcatttcggcaaagactggcatcccgcatattagcacgggcgatatctttcgtgacatcgtcgctaagcaaaacgatgaagttgcctcgaaaattaaagagttcatggagaaaggtgaactcgttccagatgaactgggtaatgcggtagtaaaacgccgcctgtcggagaaagactgcgaaaaaggctttattttggatggttatccgcgtaccgtgcgccaagcggaatatctggatagttttcttgaaagccagaatcgccagttgacagccgccgtgctgttcaaagtccccgaagatgaagttgttcagcgtctgctgtctcgcctgatctgtccgaaatgcggtcgtatctacaacatgatttttctgccaccaaaagaagacgagctgtgtgacgattgcggtgtcggcttagtacagcgtgatgatgataaggaagaaacggtccgtcaccgcctgaaagtctaccttgagaagacccagccggtcattgactattatagtaagaaaggtattctcaaacgcgtagatgggtcgcaaggaatcgacaacgttgtggcagaagtcctggggattctgggttggagcgataag

SEQ ID NO: 924 - protein, 231 aa, synthetic construct
  REGION 1..231: note = Variant of adenylate kinase
MHHHHHHGGSGMGAYLVFLGPPGAGKGTQGRRISAKTGIPHISTGDIFRDIVAKQNDEVASKIKEFMEKGELVPDELGNAVVKRRLSEKDCEKGFILDGYPRTVRQAEYLDSFLESQNRQLTAAVLFKVPEDEVVQRLLSRLICPKCGRIYNMIFLPPKEDELCDDCGVGLVQRDDDKEETVRHRLKVYLEKTQPVIDYYSKKGILKRVDGSQGIDNVVAEVLGILGWSDK

SEQ ID NO: 925 - DNA, 693 bp, synthetic construct
  misc_feature 1..693: note = Variant of adenylate kinase
  source 1..693: mol_type = other DNA
atgcaccatcatcaccatcacgggggctccggcatgggggcatatctggtgttcttaggtccgccgggcgcgggaaaaggtacccaaggccgtcgcatttcggcaaagactggcatcccgcatattagcacgggcgatatcttccgtgacatcgcagctaagcaaaacgatgaagttgcctcgaaaattaaagagatcatgctgaaaggtgaactcgttccagatgaactgggtaatgcggtagtaaaacgccgcctgtcggagaaagactgcgaaaaaggctttattttggatggttatccgcgtaccgtgcgccaagcggaatatctggatagttttcttgaaagccagaatcgccagttgacagccgccgtgctgttcaaagtccccgaagatgaagttgttcagcgtctgctgtctcgcctgatctgtccgaaatgcgggcgtatctacaacatgatttttctgccaccaaaagaagacgagctgtgtgacgattgcggtgtcggcttagtacagcgtgatgatgataaggaagaaacggtccgtcaccgcctgaaagtctaccttgagaagacccagccggtcattgactattatagtaagaaaggtattctcaaacgcgtagatgggtcgcaaggaatcgacaacgttgttgcagaagtcctggggattctgggttggagcgataag

SEQ ID NO: 926 - protein, 231 aa, synthetic construct
  REGION 1..231: note = Variant of adenylate kinase
MHHHHHHGGSGMGAYLVFLGPPGAGKGTQGRRISAKTGIPHISTGDIFRDIAAKQNDEVASKIKEIMLKGELVPDELGNAVVKRRLSEKDCEKGFILDGYPRTVRQAEYLDSFLESQNRQLTAAVLFKVPEDEVVQRLLSRLICPKCGRIYNMIFLPPKEDELCDDCGVGLVQRDDDKEETVRHRLKVYLEKTQPVIDYYSKKGILKRVDGSQGIDNVVAEVLGILGWSDK

SEQ ID NO: 927 - DNA, 693 bp, synthetic construct
  misc_feature 1..693: note = Variant of adenylate kinase
  source 1..693: mol_type = other DNA
atgcaccatcatcaccatcacgggggctccggcatgggggcatatctggtgttcttaggtccgccgggcgcgggaaaaggtacccaaggccgtcgcatttcggcaaagactggcatcccgcatattagcacgggcgatatctttcgtgacatcgtcgctaagcaaaacgatgaagttgcctcgaaaattaaagagatcatggagaaaggtgaactcgttccagatgaactgggtaatgcggtagtaaaacgccgcctgtcggagaaagactgcgaaaaaggctttattttggatggttatccgcgtaccgtgcgccaagcggaatatctggatagttttcttgaaagccagaatcgccagttgacagccgccgtgctgttcaaagtccccgaagatgaagttgttctgcgtctgctgtctcgcctgatctgtccgaaatgcttccgtatctacaacatgatttttctgccaccaaaagaagacgagctgtgtgacgattgcggtgtcggcttagtacagcgtgatgatgataaggaagaaacggtccgtcaccgcctgaaagtctaccttgagaagacccagccggtcattgactattatagtaagaaaggtattctcaaacgcgtagatgggtcgcaaggaatcgacaacgttgttgcagaagtcctggggattctgggttggagcgataag

SEQ ID NO: 928 - protein, 231 aa, synthetic construct
  REGION 1..231: note = Variant of adenylate kinase
MHHHHHHGGSGMGAYLVFLGPPGAGKGTQGRRISAKTGIPHISTGDIFRDIVAKQNDEVASKIKEIMEKGELVPDELGNAVVKRRLSEKDCEKGFILDGYPRTVRQAEYLDSFLESQNRQLTAAVLFKVPEDEVVLRLLSRLICPKCFRIYNMIFLPPKEDELCDDCGVGLVQRDDDKEETVRHRLKVYLEKTQPVIDYYSKKGILKRVDGSQGIDNVVAEVLGILGWSDK

SEQ ID NO: 929 - DNA, 693 bp, synthetic construct
  misc_feature 1..693: note = Variant of adenylate kinase
  source 1..693: mol_type = other DNA
atgcaccatcatcaccatcacgggggctccggcatgggggcatatctggtgttcttaggtccgccgggcgcgggaaaaggtacccaaggccgtcgcatttcggcaaagactggcatcccgcatattagcacgggcgatatcttccgtgacatcgtagctaagcaaaacgatgaagttgcctcgaaaattaaagagatcatggagaaaggtgaactcgttccagatgaactgggtaatgcggtagtaaaacgccgcctgtcggagaaagactgcgaaaaaggctttattttggatggttatccgcgtaccgtgcgccaagcggaatatctggatagttttcttgaaagccagaatcgccagttgacagccgccgtggccttcaaagtccccgaagatgaagttgttcagcgtctgctgtctcgcctgatctgtccgaaatgcgggcgtatctacaacatgatttttctgccaccaaaagaagacgagctgtgtgacgattgcggtgtcggcttagtacagcgtgatgatgataaggaagaaacggtccgtattcgcctgaaagtctaccttgagaagacccagccggtcattgactattatagtaagaaaggtattctcaaacgcgtagatgggtcgcaaggaatcgacaacgttgttgcagaagtcctggggattctgggttggagcgataag

SEQ ID NO: 930 - protein, 231 aa, synthetic construct
  REGION 1..231: note = Variant of adenylate kinase
MHHHHHHGGSGMGAYLVFLGPPGAGKGTQGRRISAKTGIPHISTGDIFRDIVAKQNDEVASKIKEIMEKGELVPDELGNAVVKRRLSEKDCEKGFILDGYPRTVRQAEYLDSFLESQNRQLTAAVAFKVPEDEVVQRLLSRLICPKCGRIYNMIFLPPKEDELCDDCGVGLVQRDDDKEETVRIRLKVYLEKTQPVIDYYSKKGILKRVDGSQGIDNVVAEVLGILGWSDK

SEQ ID NO: 931 - DNA, 693 bp, synthetic construct
  misc_feature 1..693: note = Variant of adenylate kinase
  source 1..693: mol_type = other DNA
atgcaccatcatcaccatcacgggggctccggcatgggggcatatctggtgttcttaggtccgccgggcgcgggaaaaggtacccaaggccgtcgcatttcggcaaagactggcatcccgcatattagcacgggcgatatcttccgtgacatcgtcgctaagcaaaacgatgaagttgcctcgaaaattaaagagatcatggagaaaggtgaactcgttccagatgaactgggtaatgcggtagtaaaacgccgcctgtcggagaaagactgcgaaaaaggctttattttggatggttatccgcgtaccgtgcgccaagcggaatatctggatagttttcttgaaagccagaatcgccagttgacagccgccgtgctgttcaaagtccccgaagatgaagttgttcagcgtctgctgtctcgcctgatctgtccgaaatgcttccgtatctacaacatgatttttctgccaccaaaagaagacgagctgtgtgacgattgcggtgtcggcttagtacagcgtgatgatgataaggaagaaacggtccgtcaccgcctgaaagtctaccttgagaagacccagccggtcattgactattatagtaagaaaggtattctcaaacgcgtagatgggtcgcaaggaatcgacaacgttgtggcagaagtcctggggattctgggttggagcgataag

SEQ ID NO: 932 - protein, 231 aa, synthetic construct
  REGION 1..231: note = Variant of adenylate kinase
MHHHHHHGGSGMGAYLVFLGPPGAGKGTQGRRISAKTGIPHISTGDIFRDIVAKQNDEVASKIKEIMEKGELVPDELGNAVVKRRLSEKDCEKGFILDGYPRTVRQAEYLDSFLESQNRQLTAAVLFKVPEDEVVQRLLSRLICPKCFRIYNMIFLPPKEDELCDDCGVGLVQRDDDKEETVRHRLKVYLEKTQPVIDYYSKKGILKRVDGSQGIDNVVAEVLGILGWSDK

SEQ ID NO: 933 - DNA, 693 bp, synthetic construct
  misc_feature 1..693: note = Variant of adenylate kinase
  source 1..693: mol_type = other DNA
atgcaccatcatcaccatcacgggggctccggcatgggggcatatctggtgttcttaggtccgccgggcgcgggaaaaggtacccaaggccgtcgcatttcggcaaagactggcatcccgcatattagcacgggcgatatcttccgtgacatcgtcgctaagcaaaacgatgaagttgcctcgaaaattaaagagatcatggagaaaggtgaactcgttccagatgaactgggtaatgcggtagtaaaacgccgcctgtcggagaaagactgcgaaaaaggctttattttggatggttatccgcgtaccgtgcgccaagcggaatatctggatagttttcttgaaagccagaatcgccagttgacagccgccgtggccttcaaagtccccgaagatgaagttgttcagcgtctgctgtctcgcctgatctgtccgaaatgcgggcgtatctacaacatgatttttctgccaccaaaagaagacgagctgtgtgacgattgcggtgtcggcttagtacagcgtgatgatgataaggaagaaacggtccgtgttcgcctgaaagtctaccttgagaagacccagccggtcattgactattatagtaagaaaggtattctcaaacgcgtagatgggtcgcaaggaatcgacaacgttgttgcagaagtcctggggattctgggttggagcgataag

SEQ ID NO: 934 - protein, 231 aa, synthetic construct
  REGION 1..231: note = Variant of adenylate kinase
MHHHHHHGGSGMGAYLVFLGPPGAGKGTQGRRISAKTGIPHISTGDIFRDIVAKQNDEVASKIKEIMEKGELVPDELGNAVVKRRLSEKDCEKGFILDGYPRTVRQAEYLDSFLESQNRQLTAAVAFKVPEDEVVQRLLSRLICPKCGRIYNMIFLPPKEDELCDDCGVGLVQRDDDKEETVRVRLKVYLEKTQPVIDYYSKKGILKRVDGSQGIDNVVAEVLGILGWSDK

SEQ ID NO: 935 - DNA, 693 bp, synthetic construct
  misc_feature 1..693: note = Variant of adenylate kinase
  source 1..693: mol_type = other DNA
atgcaccatcatcaccatcacgggggctccggcatgggggcatatctggtgttcttaggtccgccgggcgcgggaaaaggtacccaaggccgtcgcatttcggcaaagactggcatcccgcatattagcacgggcgatatcttccgtgacatcgtcgctaagcaaaacgatgaagttgcctcgaaaattaaagagatcatggagaaaggtgaactcgttccagatgaactgggtaatgcggtagtaaaacgccgcctgtcggagaaagactgcgaaaaaggctttattttggatggttatccgcgtaccgtgcgccaagcggaatatctggatagttttcttgaaagccagaatcgccagttgacagccgccgtgctgttcaaagtccccgaagatgaagttgttcagcgtctgctgtctcgcctgatctgtccgaaatgcgggcgtatctacaacatgatttttctgccaccaaaagaagacgagctgtgtgacgattgcggtgtcggcttagtacagcgtgatgatgataaggaagaaacggtccgtgttcgcctgaaagtctaccttgagaagacccagccggtcattgactattatagtaagaaaggtattctcaaacgcgtagatgggtcgcaaggaatcgacaacgttgttgcagaagtcctggggattctgggttggagcgataag

SEQ ID NO: 936 - protein, 231 aa, synthetic construct
  REGION 1..231: note = Variant of adenylate kinase
MHHHHHHGGSGMGAYLVFLGPPGAGKGTQGRRISAKTGIPHISTGDIFRDIVAKQNDEVASKIKEIMEKGELVPDELGNAVVKRRLSEKDCEKGFILDGYPRTVRQAEYLDSFLESQNRQLTAAVLFKVPEDEVVQRLLSRLICPKCGRIYNMIFLPPKEDELCDDCGVGLVQRDDDKEETVRVRLKVYLEKTQPVIDYYSKKGILKRVDGSQGIDNVVAEVLGILGWSDK

SEQ ID NO: 937 - DNA, 693 bp, synthetic construct
  misc_feature 1..693: note = Variant of adenylate kinase
  source 1..693: mol_type = other DNA
atgcaccatcatcaccatcacgggggctccggcatgggggcatatctggtgttcttaggtccgccgggcgcgggaaaaggtacccaaggccgtcgcatttcggcaaagactggcatcccgcatattagcacgggcgatatcttccgtgacatcgcagctaagcaaaacgatgaagttgcctcgaaaattaaagagatcatggagaaaggtgaactcgttccagatgaactgggtaatgcggtagtaaaacgccgcctgtcggagaaagactgcgaaaaaggctttattttggatggttatccgcgtaccgtgcgccaagcggaatatctggatagttttcttgaaagccagaatcgccagttgacagccgccgtgctgttcaaagtccccgaagatgaagttgttcagcgtctgctgtctcgcctgatctgtccgaaatgcgggcgtatctacaacatgatttttctgccaccaaaagaagacgagctgtgtgacgattgcggtgtcggcttagtacagcgtgatgatgataaggaagaaacggtccgtcaccgcctgaaagtctaccttgagaagacccagccggtcattgactattatagtaagaaaggtattctcaaacgcgtagatgggtcgcaaggaatcgacaacgttgttgcagaagtcctggggattctgggttggagcgataag

SEQ ID NO: 938 - protein, 231 aa, synthetic construct
  REGION 1..231: note = Variant of adenylate kinase
MHHHHHHGGSGMGAYLVFLGPPGAGKGTQGRRISAKTGIPHISTGDIFRDIAAKQNDEVASKIKEIMEKGELVPDELGNAVVKRRLSEKDCEKGFILDGYPRTVRQAEYLDSFLESQNRQLTAAVLFKVPEDEVVQRLLSRLICPKCGRIYNMIFLPPKEDELCDDCGVGLVQRDDDKEETVRHRLKVYLEKTQPVIDYYSKKGILKRVDGSQGIDNVVAEVLGILGWSDK

SEQ ID NO: 939 - DNA, 693 bp, synthetic construct
  misc_feature 1..693: note = Variant of adenylate kinase
  source 1..693: mol_type = other DNA
atgcaccatcatcaccatcacgggggctccggcatgggggcatatctggtgttcttaggtccgccgggcgcgggaaaaggtacccaaggccgtcgcatttcggcaaagactggcatcccgcatattagcacgggcgatatctttcgtgacatcgtcgctaagcaaaacgatgaagttgcctcgaaaattaaagagatcatggagaaaggtgaactcgttccagatgaactgggtaatgcggtagtaaaacgccgcctgtcggagaaagactgcgaaaaaggctttattttggatggttacccgcgtaccgtgcgccaagcggaatatctggatagttttcttgaaagccagaatcgccagttgacagccgccgtgctgttcaaagtccccgaagatgaagttcgcctgcgtctgctgtctcgcctgatctgtccgaaatgcttccgtatctacaacatgatttttctgccaccaaaagaagacgagctgtgtgacgattgcggtgtcggcttagtacagcgtgatgatgataaggaagaaacggtccgtcaccgcctgaaagtctaccttgagaagacccagccggtcattgactattatagtaagaaaggtattctcaaacgcgtagatgggtcgcaaggaatcgacaacgttgtggcagaagtcctggggattctgggttggagcgataag

SEQ ID NO: 940 - protein, 231 aa, synthetic construct
  REGION 1..231: note = Variant of adenylate kinase
MHHHHHHGGSGMGAYLVFLGPPGAGKGTQGRRISAKTGIPHISTGDIFRDIVAKQNDEVASKIKEIMEKGELVPDELGNAVVKRRLSEKDCEKGFILDGYPRTVRQAEYLDSFLESQNRQLTAAVLFKVPEDEVRLRLLSRLICPKCFRIYNMIFLPPKEDELCDDCGVGLVQRDDDKEETVRHRLKVYLEKTQPVIDYYSKKGILKRVDGSQGIDNVVAEVLGILGWSDK

SEQ ID NO: 941 - DNA, 693 bp, synthetic construct
  misc_feature 1..693: note = Variant of adenylate kinase
  source 1..693: mol_type = other DNA
atgcaccatcatcaccatcacgggggctccggcatgggggcatatctggtgttcttaggtccgccgggcgcgggaaaaggtacccaaggccgtcgcatttcggcaaagactggcatcccgcatattagcacgggcgatatcttccgtgacatcgtcgctaagcaaaacgatgaagttgcctcgaaaattaaagagatcatggagaaaggtgaactcgttccagatgaactgggtaatgcggtagtaaaacgccgcctgtcggagaaagactgcgaaaaaggctttattttggatggttatccgcgtaccgtgcgccaagcggaatatctggatagttttcttgaaagccagaatcgccagttgacagccgccgtggccttcaaagtccccgaagatgaagttgttcagcgtgtgctgtctcgcctgatctgtccgaaatgcgggcgtatctacaacatgatttttctgccaccaaaagaagacgagctgtgtgacgattgcggtgtcggcttagtacagcgtgatgatgataaggaagaaacggtccgtgttcgcctgaaagtctaccttgagaagacccagccggtcattgactattatagtaagaaaggtattctcaaacgcgtagatgggtcgcaaggaatcgacaacgttgttgcagaagtcctggggattctgggttggagcgataag

SEQ ID NO: 942 - protein, 231 aa, synthetic construct
  REGION 1..231: note = Variant of adenylate kinase
MHHHHHHGGSGMGAYLVFLGPPGAGKGTQGRRISAKTGIPHISTGDIFRDIVAKQNDEVASKIKEIMEKGELVPDELGNAVVKRRLSEKDCEKGFILDGYPRTVRQAEYLDSFLESQNRQLTAAVAFKVPEDEVVQRVLSRLICPKCGRIYNMIFLPPKEDELCDDCGVGLVQRDDDKEETVRVRLKVYLEKTQPVIDYYSKKGILKRVDGSQGIDNVVAEVLGILGWSDK

SEQ ID NO: 943 - DNA, 693 bp, synthetic construct
  misc_feature 1..693: note = Variant of adenylate kinase
  source 1..693: mol_type = other DNA
atgcaccatcatcaccatcacgggggctccggcatgggggcatatctggtgttcttaggtccgccgggcgcgggaaaaggtacccaaggccgtcgcatttcggcaaagactggcatcccgcatattagcacgggcgatatcttccgtgacatcgtcgctaagcaaaacgatgaagttgcctcgaaaattaaagagatcatggagaaaggtgaactcgttccagatgaactgggtaatgcggtagtaaaacgccgcctgtcggagaaagactgcgaaaaaggctttattttggatggttatccgcgtaccgtgcgccaagcggaatatctggatagttttcttgaaagccagaatcgccagttgacagccgccgtgctgttcaaagtccccgaagatgaagttgttcagcgtctgctgtctcgcctgatctgtccgaaatgcgggcgtatctacaacatgatttttctgccaccaaaagaagacgagctgtgtgacgattgcggtgtcggcttagtacagcgtgatgatgataaggaagaaacggtccgtattcgcctgaaagtctaccttgagaagacccagccggtcattgactattatagtaagaaaggtattctcaaacgcgtagatgggtcgcaaggaatcgacaacgttgttgcagaagtcctggggattctgggttggagcgataag

SEQ ID NO: 944 - protein, 231 aa, synthetic construct
  REGION 1..231: note = Variant of adenylate kinase
MHHHHHHGGSGMGAYLVFLGPPGAGKGTQGRRISAKTGIPHISTGDIFRDIVAKQNDEVASKIKEIMEKGELVPDELGNAVVKRRLSEKDCEKGFILDGYPRTVRQAEYLDSFLESQNRQLTAAVLFKVPEDEVVQRLLSRLICPKCGRIYNMIFLPPKEDELCDDCGVGLVQRDDDKEETVRIRLKVYLEKTQPVIDYYSKKGILKRVDGSQGIDNVVAEVLGILGWSDK

SEQ ID NO: 945 - DNA, 693 bp, synthetic construct
  misc_feature 1..693: note = Variant of adenylate kinase
  source 1..693: mol_type = other DNA
atgcaccatcatcaccatcacgggggctccggcatgggggcatatctggtgttcttaggtccgccgggcgcgggaaaaagtacccaaggccgtcgcatttcggcaaagactggcatcccgcatattagcacgggcgatatcttccgtgacatcgtagctaagcaaaacgatgaagttgcctcgaaaattaaagagatcatggagaaaggtgaactcgttccagatgaactgggtaatgcggtagtaaaacgccgcctgtcggagaaagactgcgaaaaaggctttattttggatggttatccgcgtaccgtgcgccaagcggaatatctggatagttttcttgaaagccagaatcgccagttgacagccgccgtgctgttcaaagtccccgaagatgaagttgttcagcgtctgctgtctcgcctgatctgtccgaaatgcgggcgtatctacaacatgatttttctgccaccaaaagaagacgagctgtgtgacgattgcggtgtcggcttagtacagcgtgatgatgataaggaagaaacggtccgtgttcgcctgaaagtctaccttgagaagacccagccggtcattgactattatagtaagaaaggtattctcaaacgcgtagatgggtcgcaaggaatcgacaacgttgttgcagaagtcctggggattctgggttggagcgataag

SEQ ID NO: 946 - protein, 231 aa, synthetic construct
  REGION 1..231: note = Variant of adenylate kinase
MHHHHHHGGSGMGAYLVFLGPPGAGKSTQGRRISAKTGIPHISTGDIFRDIVAKQNDEVASKIKEIMEKGELVPDELGNAVVKRRLSEKDCEKGFILDGYPRTVRQAEYLDSFLESQNRQLTAAVLFKVPEDEVVQRLLSRLICPKCGRIYNMIFLPPKEDELCDDCGVGLVQRDDDKEETVRVRLKVYLEKTQPVIDYYSKKGILKRVDGSQGIDNVVAEVLGILGWSDK

SEQ ID NO: 947 - DNA, 693 bp, synthetic construct
  misc_feature 1..693: note = Variant of adenylate kinase
  source 1..693: mol_type = other DNA
atgcaccatcatcaccatcacgggggctccggcatgggggcatatctggtgttcttaggtccgccgggcgcgggaaaaagtacccaaggccgtcgcatttcggcaaagactggcatcccgcatattagcacgggcgatatcttccgtgacatcgtagctaagcaaaacgatgaagttgcctcgaaaattaaagagatcatggagaaaggtgaactcgttccagatgaactgggtaatgcggtagtaaaacgccgcctgtcggagaaagactgcgaaaaaggctttattttggatggttatccgcgtaccgtgcgccaagcggaatatctggatagttttcttgaaagccagaatcgccagttgacagccgccgtggccttcaaagtccccgaagatgaagttgttcagcgtctgctgtctcgcctgatctgtccgaaatgcgggcgtatctacaacatgatttttctgccaccaaaagaagacgagctgtgtgacgattgcggtgtcggcttagtacagcgtgatgatgataaggaagaaacggtccgtcatcgcctgaaagtctaccttgagaagacccagccggtcattgactattatagtaagaaaggtattctcaaacgcgtagatgggtcgcaaggaatcgacaacgttgttgcagaagtcctggggattctgggttggagcgataag

SEQ ID NO: 948 - protein, 231 aa, synthetic construct
  REGION 1..231: note = Variant of adenylate kinase
MHHHHHHGGSGMGAYLVFLGPPGAGKSTQGRRISAKTGIPHISTGDIFRDIVAKQNDEVASKIKEIMEKGELVPDELGNAVVKRRLSEKDCEKGFILDGYPRTVRQAEYLDSFLESQNRQLTAAVAFKVPEDEVVQRLLSRLICPKCGRIYNMIFLPPKEDELCDDCGVGLVQRDDDKEETVRHRLKVYLEKTQPVIDYYSKKGILKRVDGSQGIDNVVAEVLGILGWSDK

SEQ ID NO: 949 - DNA, 693 bp, synthetic construct
  misc_feature 1..693: note = Variant of adenylate kinase
  source 1..693: mol_type = other DNA
atgcaccatcatcaccatcacgggggctccggcatgggggcatatctggtgttcttaggtccgccgggcgcgggaaaaagtacccaaggccgtcgcatttcggcaaagactggcatcccgcatattagcacgggcgatatcttccgtgacatcgtagctaagcaaaacgatgaagttgcctcgaaaattaaagagatcatggagaaaggtgaactcgttccagatgaactgggtaatgcggtagtaaaacgccgcctgtcggagaaagactgcgaaaaaggctttattttggatggttatccgcgtaccgtgcgccaagcggaatatctggatagttttcttgaaagccagaatcgccagttgacagccgccgtggccttcaaagtccccgaagatgaagttgttcagcgtctgctgtctcgcctgatctgtccgaaatgcaggcgtatctacaacatgatttttctgccaccaaaagaagacgagctgtgtgacgattgcggtgtcggcttagtacagcgtgatgatgataaggaagaaacggtccgtcaccgcctgaaagtctaccttgagaagacccagccggtcattgactattatagtaagaaaggtattctcaaacgcgtagatgggtcgcaaggaatcgacaacgttgttgcagaagtcctggggattctgggttggagcgataag

SEQ ID NO: 950 - protein, 231 aa, synthetic construct
  REGION 1..231: note = Variant of adenylate kinase
MHHHHHHGGSGMGAYLVFLGPPGAGKSTQGRRISAKTGIPHISTGDIFRDIVAKQNDEVASKIKEIMEKGELVPDELGNAVVKRRLSEKDCEKGFILDGYPRTVRQAEYLDSFLESQNRQLTAAVAFKVPEDEVVQRLLSRLICPKCRRIYNMIFLPPKEDELCDDCGVGLVQRDDDKEETVRHRLKVYLEKTQPVIDYYSKKGILKRVDGSQGIDNVVAEVLGILGWSDK

SEQ ID NO: 951 - DNA, 693 bp, synthetic construct
  misc_feature 1..693: note = Variant of adenylate kinase
  source 1..693: mol_type = other DNA
atgcaccatcatcaccatcacgggggctccggcatgggggcatatctggtgttcttaggtccgccgggcgcgggaaaaagtacccaaggccgtcgcatttcggcaaagactggcatcccgcatattagcacgggcgatatcttccgtgacatcgtagctaagcaaaacgatgaagttgcctcgaaaattaaagagatcatggagaaaggtgaactcgttccagatgaactgggtaatgcggtggtcaaacgccgcctgtcggagaaagactgcgaaaaaggctttattttggatggttatccgcgtaccgtgcgccaagcggaatatctggatagttttcttgaaagccagaatcgccagttgacagccgccgtgctgttcaaagtccccgaagatgaagttgttcagcgtctgctgtctcgcctgatctgtccgaaatgcgggcgtatctacaacatgatttttctgccaccaaaagaagacgagctgtgtgacgattgcggtgtcggcttagtacagcgtgatgatgataaggaagaaacggtccgtcaccgcctgaaagtctaccttgagaagacccagccggtcattgactattatagtaagaaaggtattctcaaacgcgtagatgggtcgcaaggaatcgacaacgttgttgcagaagtcctggggattctgggttggagcgataag

SEQ ID NO: 952 - protein, 231 aa, synthetic construct
  REGION 1..231: note = Variant of adenylate kinase
MHHHHHHGGSGMGAYLVFLGPPGAGKSTQGRRISAKTGIPHISTGDIFRDIVAKQNDEVASKIKEIMEKGELVPDELGNAVVKRRLSEKDCEKGFILDGYPRTVRQAEYLDSFLESQNRQLTAAVLFKVPEDEVVQRLLSRLICPKCGRIYNMIFLPPKEDELCDDCGVGLVQRDDDKEETVRHRLKVYLEKTQPVIDYYSKKGILKRVDGSQGIDNVVAEVLGILGWSDK

SEQ ID NO: 953 - DNA, 693 bp, synthetic construct
  misc_feature 1..693: note = Variant of adenylate kinase
  source 1..693: mol_type = other DNA
atgcaccatcatcaccatcacgggggctccggcatgggggcatatctggtgttcttaggtccgccgggcgcgggaaaaagtacccaaggccgtcgcatttcggcaaagactggcatcccgcatattagcacgggcgatatcttccgtgacatcgtcgctaagcaaaacgatgaagttgcctcgaaaattaaagagatcatggagaaaggtgaactcgttccagatgaactgggtaatgcggtagtaaaacgccgcctgtcggagaaagactgcgaaaaaggctttattttggatggttatccgcgtaccgtgcgccaagcggaatatctggatagttttcttgaaagccagaatcgccagttgacagccgccgtggccttcaaagtccccgaagatgaagttgttcagcgtctgctgtctcgcctgatctgtccgaaatgcgggcgtatctacaacatgatttttctgccaccaaaagaagacgagctgtgtgacgattgcggtgtcggcttagtacagcgtgatgatgataaggaagaaacggtccgtgttcgcctgaaagtctaccttgagaagacccagccggtcattgactattatagtaagaaaggtattctcaaacgcgtagatgggtcgcaaggaatcgacaacgttgttgcagaagtcctggggattctgggttggagcgataag

SEQ ID NO: 954 - protein, 231 aa, synthetic construct
  REGION 1..231: note = Variant of adenylate kinase
MHHHHHHGGSGMGAYLVFLGPPGAGKSTQGRRISAKTGIPHISTGDIFRDIVAKQNDEVASKIKEIMEKGELVPDELGNAVVKRRLSEKDCEKGFILDGYPRTVRQAEYLDSFLESQNRQLTAAVAFKVPEDEVVQRLLSRLICPKCGRIYNMIFLPPKEDELCDDCGVGLVQRDDDKEETVRVRLKVYLEKTQPVIDYYSKKGILKRVDGSQGIDNVVAEVLGILGWSDK

SEQ ID NO: 955 - DNA, 693 bp, synthetic construct
  misc_feature 1..693: note = Variant of adenylate kinase
  source 1..693: mol_type = other DNA
atgcaccatcatcaccatcacgggggctccggcatgggggcatatctggtgttcttaggtccgccgggcgcgggaaaaggtacccaaggccgtcgcatttcggcaaagactggcatcccgcatattagcacgggcgatatctttcgtgacatcgtcgctaagcaaaacgatgaagttgcctcgaaaattaaagagcaaatggagaaaggtgaactcgttccagatgaactgggtaatgcggtagtaaaacgccgcctgtcggagaaagactgcgaaaaaggctttattttggatggtttcccgcgtaccgtgcgccaagcggaatatctggatagttttcttgaaagccagaatcgccagttgacagccgccgtgctgttcaaagtccccgaagatgaagttcgccagcgtctgctgtctcgcctgatctgtccgaaatgcggtcgtatctacaacatgatttttctgccaccaaaagaagacgagctgtgtgacgattgcggtgtcggcttagtacagcgtgatgatgataaggaagaaacggtccgtcaccgcctgaaagtctaccttgagaagacccagccggtcattgactattatagtaagaaaggtattctcaaacgcgtagatgggtcgcaaggaatcgacaacgttctggcagaagtcctggggattctgggttggagcgataag

SEQ ID NO: 956 - protein, 231 aa, synthetic construct
  REGION 1..231: note = Variant of adenylate kinase
MHHHHHHGGSGMGAYLVFLGPPGAGKGTQGRRISAKTGIPHISTGDIFRDIVAKQNDEVASKIKEQMEKGELVPDELGNAVVKRRLSEKDCEKGFILDGFPRTVRQAEYLDSFLESQNRQLTAAVLFKVPEDEVRQRLLSRLICPKCGRIYNMIFLPPKEDELCDDCGVGLVQRDDDKEETVRHRLKVYLEKTQPVIDYYSKKGILKRVDGSQGIDNVLAEVLGILGWSDK

SEQ ID NO: 957 - DNA, 693 bp, synthetic construct
  misc_feature 1..693: note = Variant of adenylate kinase
  source 1..693: mol_type = other DNA
atgcaccatcatcaccatcacgggggctccggcatgggggcatatctggtgttcttaggtccgccgggcgcgggaaaaagtacccaaggccgtcgcatttcggcaaagactggcatcccgcatattagcacgggcgatatcttccgtgacatcgtagctaagcaaaacgatgaagttgcctcgaaaattaaagagatcatggcgaaaggtgaactcgttccagatgaactgggtaatgcggtagtaaaacgccgcctgtcggagaaagactgcgaaaaaggctttattttggatggttatccgcgtaccgtgcgccaagcggaatatctggatagttttcttgaaagccagaatcgccagttgacagccgccgtgctgttcaaagtccccgaagatgaagttgttcagcgtctgctgtctcgcctgatctgtccgaaatgcgggcgtatctacaacatgatttttctgccaccaaaagaagacgagctgtgtgacgattgcggtgtcggcttagtacagcgtgatgatgataaggaagaaacggtccgtcatcgcctgaaagtctaccttgagaagacccagccggtcattgactattatagtaagaaaggtattctcaaacgcgtagatgggtcgcaaggaatcgacaacgttgttgcagaagtcctggggattctgggttggagcgataag

SEQ ID NO: 958 - protein, 231 aa, synthetic construct
  REGION 1..231: note = Variant of adenylate kinase
MHHHHHHGGSGMGAYLVFLGPPGAGKSTQGRRISAKTGIPHISTGDIFRDIVAKQNDEVASKIKEIMAKGELVPDELGNAVVKRRLSEKDCEKGFILDGYPRTVRQAEYLDSFLESQNRQLTAAVLFKVPEDEVVQRLLSRLICPKCGRIYNMIFLPPKEDELCDDCGVGLVQRDDDKEETVRHRLKVYLEKTQPVIDYYSKKGILKRVDGSQGIDNVVAEVLGILGWSDK

SEQ ID NO: 959 - DNA, 693 bp, synthetic construct
  misc_feature 1..693: note = Variant of adenylate kinase
  source 1..693: mol_type = other DNA
atgcaccatcatcaccatcacgggggctccggcatgggggcatatctggtgttcttaggtccgccgggcgcgggaaaaggtacccaaggccgtcgcatttcggcaaagactggcatcccgcatattagcacgggcgatatcttccgtgacatcgcagctaagcaaaacgatgaagttgcctcgaaaattaaagagatcatggcgaaaggtgaactcgttccagatgaactgggtaatgcgctggtcaaacgccgcctgtcggagaaagactgcgaaaaaggctttattttggatggttatccgcgtaccgtgcgccaagcggaatatctggatagttttcttgaaagccagaatcgccagttgacagccgccgtggccttcaaagtccccgaagatgaagttgttcagcgtctgctgtctcgcctgatctgtccgaaatgcgggcgtatctacaacatgatttttctgccaccaaaagaagacgagctgtgtgacgattgcggtgtcggcttagtacagcgtgatgatgataaggaagaaacggtccgtcatcgcctgaaagtctaccttgagaagacccagccggtcattgactattatagtaagaaaggtattctcaaacgcgtagatgggtcgcaaggaatcgacaacgttgttgcagaagtcctggggattctgggttggagcgataag

SEQ ID NO: 960 - protein, 231 aa, synthetic construct
  REGION 1..231: note = Variant of adenylate kinase
MHHHHHHGGSGMGAYLVFLGPPGAGKGTQGRRISAKTGIPHISTGDIFRDIAAKQNDEVASKIKEIMAKGELVPDELGNALVKRRLSEKDCEKGFILDGYPRTVRQAEYLDSFLESQNRQLTAAVAFKVPEDEVVQRLLSRLICPKCGRIYNMIFLPPKEDELCDDCGVGLVQRDDDKEETVRHRLKVYLEKTQPVIDYYSKKGILKRVDGSQGIDNVVAEVLGILGWSDK

SEQ ID NO: 961 - DNA, 693 bp, synthetic construct
  misc_feature 1..693: note = Variant of adenylate kinase
  source 1..693: mol_type = other DNA
atgcaccatcatcaccatcacgggggctccggcatgggggcatatctggtgttcttaggtccgccgggcgcgggaaaaggtacccaaggccgtcgcatttcggcaaagactggcatcccgcatattagcacgggcgatatctttcgtgacatcgtcgctaagcaaaacgatgaagttgcctcgaaaattaaagagcaaatggagaaaggtgaactcgttccagatgaactgggtaatgcggtagtaaaacgccgcctgtcggagaaagactgcgaaaaaggctttattttggatggttatccgcgtaccgtgcgccaagcggaatatctggatagttttcttgaaagccagaatcgccagttgacagccgccgtgctgttcaaagtccccgaagatgaagttgttcagcgtctgctgtctcgcctgatctgtccgaaatgcgggcgtatctacaacatgatttttctgccaccaaaagaagacgagctgtgtgacgattgcggtgtcggcttagtacagcgtgatgatgataaggaagaaacggtccgtcaccgcctgaaagtctaccttgagaagacccagccggtcattgactattatagtaagaaaggtattctcaaacgcgtagatgggtcgcaaggaatcgacaacgttgtggcagaagtcctggggattctgggttggagcgataag

SEQ ID NO: 962 - protein, 231 aa, synthetic construct
  REGION 1..231: note = Variant of adenylate kinase
MHHHHHHGGSGMGAYLVFLGPPGAGKGTQGRRISAKTGIPHISTGDIFRDIVAKQNDEVASKIKEQMEKGELVPDELGNAVVKRRLSEKDCEKGFILDGYPRTVRQAEYLDSFLESQNRQLTAAVLFKVPEDEVVQRLLSRLICPKCGRIYNMIFLPPKEDELCDDCGVGLVQRDDDKEETVRHRLKVYLEKTQPVIDYYSKKGILKRVDGSQGIDNVVAEVLGILGWSDK

SEQ ID NO: 963 - DNA, 693 bp, synthetic construct
  misc_feature 1..693: note = Variant of adenylate kinase
  source 1..693: mol_type = other DNA
atgcaccatcatcaccatcacgggggctccggcatgggggcatatctggtgttcttaggtccgccgggcgcgggaaaaggtacccaaggccgtcgcatttcggcaaagactggcatcccgcatattagcacgggcgatatcctgcgtgacatcgtcgctaagcaaaacgatgaagttgcctcgaaaattaaagagcaaatggagaaaggtgaactcgttccagatgaactgggtaatgcggtagtaaaacgccgcctgtcggagaaagactgcgaaaaaggctttattttggatggttacccgcgtaccgtgcgccaagcggaatatctggatagttttcttgaaagccagaatcgccagttgacagccgccgtgctgttcaaagtccccgaagatgaagttgttctgcgtctgctgtctcgcctgatctgtccgaaatgcttccgtatctacaacatgatttttctgccaccaaaagaagacgagctgtgtgacgattgcggtgtcggcttagtacagcgtgatgatgataaggaagaaacggtccgtcaccgcctgaaagtctaccttgagaagacccagccggtcattgactattatagtaagaaaggtattctcaaacgcgtagatgggtcgcaaggaatcgacaacgttgtggcagaagtcctggggattctgggttggagcgataag

SEQ ID NO: 964 - protein, 231 aa, synthetic construct
  REGION 1..231: note = Variant of adenylate kinase
MHHHHHHGGSGMGAYLVFLGPPGAGKGTQGRRISAKTGIPHISTGDILRDIVAKQNDEVASKIKEQMEKGELVPDELGNAVVKRRLSEKDCEKGFILDGYPRTVRQAEYLDSFLESQNRQLTAAVLFKVPEDEVVLRLLSRLICPKCFRIYNMIFLPPKEDELCDDCGVGLVQRDDDKEETVRHRLKVYLEKTQPVIDYYSKKGILKRVDGSQGIDNVVAEVLGILGWSDK

SEQ ID NO: 965 - DNA, 693 bp, synthetic construct
  misc_feature 1..693: note = Variant of adenylate kinase
  source 1..693: mol_type = other DNA
atgcaccatcatcaccatcacgggggctccggcatgggggcatatctggtgttcttaggtccgccgggcgcgggaaaaggtacccaaggccgtcgcatttcggcaaagactggcatcccgcatattagcacgggcgatatctttcgtgacatcgtcgctaagcaaaacgatgaagttgcctcgaaaattaaagagttcatggagaaaggtgaactcgttccagatgaactgggtaatgcggtagtaaaacgccgcctgtcggagaaagactgcgaaaaaggctttattttggatggttatccgcgtaccgtgcgccaagcggaatatctggatagttttcttgaaagccagaatcgccagttgacagccgccgtgctgttcaaagtccccgaagatgaagttgttctgcgtctgctgtctcgcctgatctgtccgaaatgccaccgtatctacaacatgatttttctgccaccaaaagaagacgagctgtgtgacgattgcggtgtcggcttagtacagcgtgatgatgataaggaagaaacggtccgtcaccgcctgaaagtctaccttgagaagacccagccggtcattgactattatagtaagaaaggtattctcaaacgcgtagatgggtcgcaaggaatcgacaacgttgtggcagaagtcctggggattctgggttggagcgataag

SEQ ID NO: 966 - protein, 231 aa, synthetic construct
  REGION 1..231: note = Variant of adenylate kinase
MHHHHHHGGSGMGAYLVFLGPPGAGKGTQGRRISAKTGIPHISTGDIFRDIVAKQNDEVASKIKEFMEKGELVPDELGNAVVKRRLSEKDCEKGFILDGYPRTVRQAEYLDSFLESQNRQLTAAVLFKVPEDEVVLRLLSRLICPKCHRIYNMIFLPPKEDELCDDCGVGLVQRDDDKEETVRHRLKVYLEKTQPVIDYYSKKGILKRVDGSQGIDNVVAEVLGILGWSDK

SEQ ID NO: 967 - DNA, 693 bp, synthetic construct
  misc_feature 1..693: note = Variant of adenylate kinase
  source 1..693: mol_type = other DNA
atgcaccatcatcaccatcacgggggctccggcatgggggcatatctggtgttcttaggtccgccgggcgcgggaaaaggtacccaaggccgtcgcatttcggcaaagactggcatcccgcatattagcacgggcgatatctttcgtgacatcgtcgctaagcaaaacgatgaagttgcctcgaaaattaaagagcaaatggagaaaggtgaactcgttccagatgaactgggtaatgcggtagtaaaacgccgcctgtcggagaaagactgcgaaaaaggctttattttggatggttacccgcgtaccgtgcgccaagcggaatatctggatagttttcttgaaagccagaatcgccagttgacagccgccgtgctgttcaaagtccccgaagatgaagttcgccagcgtctgctgtctcgcctgatctgtccgaaatgcggtcgtatctacaacatgatttttctgccaccaaaagaagacgagctgtgtgacgattgcggtgtcggcttagtacagcgtgatgatgataaggaagaaacggtccgtcaccgcctgaaagtctaccttgagaagacccagccggtcattgactattatagtaagaaaggtattctcaaacgcgtagatgggtcgcaaggaatcgacaacgttgtggcagaagtcctggggattctgggttggagcgataag

SEQ ID NO: 968 - protein, 231 aa, synthetic construct
  REGION 1..231: note = Variant of adenylate kinase
MHHHHHHGGSGMGAYLVFLGPPGAGKGTQGRRISAKTGIPHISTGDIFRDIVAKQNDEVASKIKEQMEKGELVPDELGNAVVKRRLSEKDCEKGFILDGYPRTVRQAEYLDSFLESQNRQLTAAVLFKVPEDEVRQRLLSRLICPKCGRIYNMIFLPPKEDELCDDCGVGLVQRDDDKEETVRHRLKVYLEKTQPVIDYYSKKGILKRVDGSQGIDNVVAEVLGILGWSDK

SEQ ID NO: 969 - DNA, 693 bp, synthetic construct
  misc_feature 1..693: note = Variant of adenylate kinase
  source 1..693: mol_type = other DNA
atgcaccatcatcaccatcacgggggctccggcatgggggcatatctggtgttcttaggtccgccgggcgcgggaaaaggtacccaaggccgtcgcatttcggcaaagactggcatcccgcatattagcacgggcgatatctttcgtgacatcgtcgctaagcaaaacgatgaagttgcctcgaaaattaaagagcaaatggagaaaggtgaactcgttccagatgaactgggtaatgcggtagtaaaacgccgcctgtcggagaaagactgcgaaaaaggctttattttggatggttatccgcgtaccgtgcgccaagcggaatatctggatagttttcttgaaagccagaatcgccagttgacagccgccgtgctgttcaaagtccccgaagatgaagttgttctgcgtctgctgtctcgcctgatctgtccgaaatgcgggcgtatctacaacatgatttttctgccaccaaaagaagacgagctgtgtgacgattgcggtgtcggcttagtacagcgtgatgatgataaggaagaaacggtccgtcaccgcctgaaagtctaccttgagaagacccagccggtcattgactattatagtaagaaaggtattctcaaacgcgtagatgggtcgcaaggaatcgacaacgttgttgcagaagtcctggggattctgggttggagcgataag

SEQ ID NO: 970 - protein, 231 aa, synthetic construct
  REGION 1..231: note = Variant of adenylate kinase
MHHHHHHGGSGMGAYLVFLGPPGAGKGTQGRRISAKTGIPHISTGDIFRDIVAKQNDEVASKIKEQMEKGELVPDELGNAVVKRRLSEKDCEKGFILDGYPRTVRQAEYLDSFLESQNRQLTAAVLFKVPEDEVVLRLLSRLICPKCGRIYNMIFLPPKEDELCDDCGVGLVQRDDDKEETVRHRLKVYLEKTQPVIDYYSKKGILKRVDGSQGIDNVVAEVLGILGWSDK

SEQ ID NO: 971 - DNA, 693 bp, synthetic construct
  misc_feature 1..693: note = Variant of adenylate kinase
  source 1..693: mol_type = other DNA
atgcaccatcatcaccatcacgggggctccggcatgggggcatatctggtgttcttaggtccgccgggcgcgggaaaaggtacccaaggccgtcgcatttcggcaaagactggcatcccgcatattagcacgggcgatatctttcgtgacatcgtcgctaagcaaaacgatgaagttgcctcgaaaattaaagagttcatggagaaaggtgaactcgttccagatgaactgggtaatgcggtagtaaaacgccgcctgtcggagaaagactgcgaaaaaggctttattttggatggttatccgcgtaccgtgcgccaagcggaatatctggatagttttcttgaaagccagaatcgccagttgacagccgccgtgctgttcaaagtccccgaagatgaagttcgccagcgtctgctgtctcgcctgatctgtccgaaatgcgggcgtatctacaacatgatttttctgccaccaaaagaagacgagctgtgtgacgattgcggtgtcggcttagtacagcgtgatgatgataaggaagaaacggtccgtcaccgcctgaaagtctaccttgagaagacccagccggtcattgactattatagtaagaaaggtattctcaaacgcgtagatgggtcgcaaggaatcgacaacgttctggcagaagtcctggggattctgggttggagcgataag

SEQ ID NO: 972 - protein, 231 aa, synthetic construct
  REGION 1..231: note = Variant of adenylate kinase
MHHHHHHGGSGMGAYLVFLGPPGAGKGTQGRRISAKTGIPHISTGDIFRDIVAKQNDEVASKIKEFMEKGELVPDELGNAVVKRRLSEKDCEKGFILDGYPRTVRQAEYLDSFLESQNRQLTAAVLFKVPEDEVRQRLLSRLICPKCGRIYNMIFLPPKEDELCDDCGVGLVQRDDDKEETVRHRLKVYLEKTQPVIDYYSKKGILKRVDGSQGIDNVLAEVLGILGWSDK

SEQ ID NO: 973 - DNA, 693 bp, synthetic construct
  misc_feature 1..693: note = Variant of adenylate kinase
  source 1..693: mol_type = other DNA
atgcaccatcatcaccatcacgggggctccggcatgggggcatatctggtgttcttaggtccgccgggcgcgggaaaaggtacccaaggccgtcgcatttcggcaaagactggcatcccgcatattagcacgggcgatatctttcgtgacatcgtcgctaagcaaaacgatgaagttgcctcgaaaattaaagagatcatggagaaaggtgaactcgttccagatgaactgggtaatgcggtagtaaaacgccgcctgtcggagaaagactgcgaaaaaggctttattttggatggttatccgcgtaccgtgcgccaagcggaatatctggatagttttcttgaaagccagaatcgccagttgacagccgccgtgctgttcaaagtccccgaagatgaagttgttctgcgtctgctgtctcgcctgatctgtccgaaatgcgggcgtatctacaacatgatttttctgccaccaaaagaagacgagctgtgtgacgattgcggtgtcggcttagtacagcgtgatgatgataaggaagaaacggtccgtcaccgcctgaaagtctaccttgagaagacccagccggtcattgactattatagtaagaaaggtattctcaaacgcgtagatgggtcgcaaggaatcgacaacgttgttgcagaagtcctggggattctgggttggagcgataag

SEQ ID NO: 974 - protein, 231 aa, synthetic construct
  REGION 1..231: note = Variant of adenylate kinase
MHHHHHHGGSGMGAYLVFLGPPGAGKGTQGRRISAKTGIPHISTGDIFRDIVAKQNDEVASKIKEIMEKGELVPDELGNAVVKRRLSEKDCEKGFILDGYPRTVRQAEYLDSFLESQNRQLTAAVLFKVPEDEVVLRLLSRLICPKCGRIYNMIFLPPKEDELCDDCGVGLVQRDDDKEETVRHRLKVYLEKTQPVIDYYSKKGILKRVDGSQGIDNVVAEVLGILGWSDK

SEQ ID NO: 975 - DNA, 693 bp, synthetic construct
  misc_feature 1..693: note = Variant of adenylate kinase
  source 1..693: mol_type = other DNA
atgcaccatcatcaccatcacgggggctccggcatgggggcatatctggtgttcttaggtccgccgggcgcgggaaaaggtacccaaggccgtcgcatttcggcaaagactggcatcccgcatattagcacgggcgatatctttcgtgacatcgtcgctaagcaaaacgatgaagttgcctcgaaaattaaagagatcatggagaaaggtgaactcgttccagatgaactgggtaatgcggtagtaaaacgccgcctgtcggagaaagactgcgaaaaaggctttattttggatggttacccgcgtaccgtgcgccaagcggaatatctggatagttttcttgaaagccagaatcgccagttgacagccgccgtgctgttcaaagtccccgaagatgaagttcgccagcgtctgctgtctcgcctgatctgtccgaaatgcttccgtatctacaacatgatttttctgccaccaaaagaagacgagctgtgtgacgattgcggtgtcggcttagtacagcgtgatgatgataaggaagaaacggtccgtcaccgcctgaaagtctaccttgagaagacccagccggtcattgactattatagtaagaaaggtattctcaaacgcgtagatgggtcgcaaggaatcgacaacgttctggcagaagtcctggggattctgggttggagcgataag

SEQ ID NO: 976 - protein, 231 aa, synthetic construct
  REGION 1..231: note = Variant of adenylate kinase
MHHHHHHGGSGMGAYLVFLGPPGAGKGTQGRRISAKTGIPHISTGDIFRDIVAKQNDEVASKIKEIMEKGELVPDELGNAVVKRRLSEKDCEKGFILDGYPRTVRQAEYLDSFLESQNRQLTAAVLFKVPEDEVRQRLLSRLICPKCFRIYNMIFLPPKEDELCDDCGVGLVQRDDDKEETVRHRLKVYLEKTQPVIDYYSKKGILKRVDGSQGIDNVLAEVLGILGWSDK

SEQ ID NO: 977 - DNA, 693 bp, synthetic construct
  misc_feature 1..693: note = Variant of adenylate kinase
  source 1..693: mol_type = other DNA
atgcaccatcatcaccatcacgggggctccggcatgggggcatatctggtgttcttaggtccgccgggcgcgggaaaaggtacccaaggccgtcgcatttcggcaaagactggcatcccgcatattagcacgggcgatatcttccgtgacatcgtagctaagcaaaacgatgaagttgcctcgaaaattaaagagatcatggcgaaaggtgaactcgttccagatgaactgggtaatgcggtagtaaaacgccgcctgtcggagaaagactgcgaaaaaggctttattttggatggttatccgcgtaccgtgcgccaagcggaatatctggatagttttcttgaaagccagaatcgccagttgacagccgccgtggccttcaaagtccccgaagatgaagttgttcagcgtctgctgtctcgcctgatctgtccgaaatgcgggcgtatctacaacatgatttttctgccaccaaaagaagacgagctgtgtgacgattgcggtgtcggcttagtacagcgtgatgatgataaggaagaaacggtccgtcatcgcctgaaagtctaccttgagaagacccagccggtcattgactattatagtaagaaaggtattctcaaacgcgtagatgggtcgcaaggaatcgacaacgttgttgcagaagtcctggggattctgggttggagcgataag

SEQ ID NO: 978 - protein, 231 aa, synthetic construct
  REGION 1..231: note = Variant of adenylate kinase
MHHHHHHGGSGMGAYLVFLGPPGAGKGTQGRRISAKTGIPHISTGDIFRDIVAKQNDEVASKIKEIMAKGELVPDELGNAVVKRRLSEKDCEKGFILDGYPRTVRQAEYLDSFLESQNRQLTAAVAFKVPEDEVVQRLLSRLICPKCGRIYNMIFLPPKEDELCDDCGVGLVQRDDDKEETVRHRLKVYLEKTQPVIDYYSKKGILKRVDGSQGIDNVVAEVLGILGWSDK

SEQ ID NO: 979 - DNA, 693 bp, synthetic construct
  misc_feature 1..693: note = Variant of adenylate kinase
  source 1..693: mol_type = other DNA
atgcaccatcatcaccatcacgggggctccggcatgggggcatatctggtgttcttaggtccgccgggcgcgggaaaaggtacccaaggccgtcgcatttcggcaaagactggcatcccgcatattagcacgggcgatatctttcgtgacatcgtcgctaagcaaaacgatgaagttgcctcgaaaattaaagagttcatggagaaaggtgaactcgttccagatgaactgggtaatgcggtagtaaaacgccgcctgtcggagaaagactgcgaaaaaggctttattttggatggttacccgcgtaccgtgcgccaagcggaatatctggatagttttcttgaaagccagaatcgccagttgacagccgccgtgctgttcaaagtccccgaagatgaagttgttcagcgtctgctgtctcgcctgatctgtccgaaatgccaccgtatctacaacatgatttttctgccaccaaaagaagacgagctgtgtgacgattgcggtgtcggcttagtacagcgtgatgatgataaggaagaaacggtccgtcaccgcctgaaagtctaccttgagaagacccagccggtcattgactattatagtaagaaaggtattctcaaacgcgtagatgggtcgcaaggaatcgacaacgttctggcagaagtcctggggattctgggttggagcgataag

SEQ ID NO: 980 - protein, 231 aa, synthetic construct
  REGION 1..231: note = Variant of adenylate kinase
MHHHHHHGGSGMGAYLVFLGPPGAGKGTQGRRISAKTGIPHISTGDIFRDIVAKQNDEVASKIKEFMEKGELVPDELGNAVVKRRLSEKDCEKGFILDGYPRTVRQAEYLDSFLESQNRQLTAAVLFKVPEDEVVQRLLSRLICPKCHRIYNMIFLPPKEDELCDDCGVGLVQRDDDKEETVRHRLKVYLEKTQPVIDYYSKKGILKRVDGSQGIDNVLAEVLGILGWSDK

SEQ ID NO: 981 - DNA, 693 bp, synthetic construct
  misc_feature 1..693: note = Variant of adenylate kinase
  source 1..693: mol_type = other DNA
atgcaccatcatcaccatcacgggggctccggcatgggggcatatctggtgttcttaggtccgccgggcgcgggaaaaagtacccaaggccgtcgcatttcggcaaagactggcatcccgcatattagcacgggcgatatcttccgtgacatcgtagctaagcaaaacgatgaagttgcctcgaaaattaaagagatcatgctgaaaggtgaactcgttccagatgaactgggtaatgcggtagtaaaacgccgcctgtcggagaaagactgcgaaaaaggctttattttggatggttatccgcgtaccgtgcgccaagcggaatatctggatagttttcttgaaagccagaatcgccagttgacagccgccgtggccttcaaagtccccgaagatgaagttgttcagcgtctgctgtctcgcctgatctgtccgaaatgcgggcgtatctacaacatgatttttctgccaccaaaagaagacgagctgtgtgacgattgcggtgtcggcttagtacagcgtgatgatgataaggaagaaacggtccgtcatcgcctgaaagtctaccttgagaagacccagccggtcattgactattatagtaagaaaggtattctcaaacgcgtagatgggtcgcaaggaatcgacaacgttgttgcagaagtcctggggattctgggttggagcgataag

SEQ ID NO: 982 - protein, 231 aa, synthetic construct
  REGION 1..231: note = Variant of adenylate kinase
MHHHHHHGGSGMGAYLVFLGPPGAGKSTQGRRISAKTGIPHISTGDIFRDIVAKQNDEVASKIKEIMLKGELVPDELGNAVVKRRLSEKDCEKGFILDGYPRTVRQAEYLDSFLESQNRQLTAAVAFKVPEDEVVQRLLSRLICPKCGRIYNMIFLPPKEDELCDDCGVGLVQRDDDKEETVRHRLKVYLEKTQPVIDYYSKKGILKRVDGSQGIDNVVAEVLGILGWSDK

SEQ ID NO: 983 - DNA, 693 bp, synthetic construct
  misc_feature 1..693: note = Variant of adenylate kinase
  source 1..693: mol_type = other DNA
atgcaccatcatcaccatcacgggggctccggcatgggggcatatctggtgttcttaggtccgccgggcgcgggaaaaagtacccaaggccgtcgcatttcggcaaagactggcatcccgcatattagcacgggcgatatcttccgtgacatcgtcgctaagcaaaacgatgaagttgcctcgaaaattaaagagatcatgctgaaaggtgaactcgttccagatgaactgggtaatgcggtggtcaaacgccgcctgtcggagaaagactgcgaaaaaggctttattttggatggttatccgcgtaccgtgcgccaagcggaatatctggatagttttcttgaaagccagaatcgccagttgacagccgccgtgctgttcaaagtccccgaagatgaagttgttcagcgtctgctgtctcgcctgatctgtccgaaatgcgggcgtatctacaacatgatttttctgccaccaaaagaagacgagctgtgtgacgattgcggtgtcggcttagtacagcgtgatgatgataaggaagaaacggtccgtgttcgcctgaaagtctaccttgagaagacccagccggtcattgactattatagtaagaaaggtattctcaaacgcgtagatgggtcgcaaggaatcgacaacgttgttgcagaagtcctggggattctgggttggagcgataag

SEQ ID NO: 984 - protein, 231 aa, synthetic construct
  REGION 1..231: note = Variant of adenylate kinase
MHHHHHHGGSGMGAYLVFLGPPGAGKSTQGRRISAKTGIPHISTGDIFRDIVAKQNDEVASKIKEIMLKGELVPDELGNAVVKRRLSEKDCEKGFILDGYPRTVRQAEYLDSFLESQNRQLTAAVLFKVPEDEVVQRLLSRLICPKCGRIYNMIFLPPKEDELCDDCGVGLVQRDDDKEETVRVRLKVYLEKTQPVIDYYSKKGILKRVDGSQGIDNVVAEVLGILGWSDK

SEQ ID NO: 985 - DNA, 693 bp, synthetic construct
  misc_feature 1..693: note = Variant of adenylate kinase
  source 1..693: mol_type = other DNA
atgcaccatcatcaccatcacgggggctccggcatgggggcatatctggtgttcttaggtccgccgggcgcgggaaaaggtacccaaggccgtcgcatttcggcaaagactggcatcccgcatattagcacgggcgatatcttccgtgacatcgtcgctaagcaaaacgatgaagttgcctcgaaaattaaagagatcatggagaaaggtgaactcgttccagatgaactgggtaatgcggtggtcaaacgccgcctgtcggagaaagactgcgaaaaaggctttattttggatggttatccgcgtaccgtgcgccaagcggaatatctggatagttttcttgaaagccagaatcgccagttgacagccgccgtggccttcaaagtccccgaagatgaagttgttcagcgtctgctgtctcgcctgatctgtccgaaatgcgggcgtatctacaacatgatttttctgccaccaaaagaagacgagctgtgtgacgattgcggtgtcggcttagtacagcgtgatgatgataaggaagaaacggtccgtcaccgcctgaaagtctaccttgagaagacccagccggtcattgactattatagtaagaaaggtattctcaaacgcgtagatgggtcgcaaggaatcgacaacgttgttgcagaagtcctggggattctgggttggagcgataag

SEQ ID NO: 986 - protein, 231 aa, synthetic construct
  REGION 1..231: note = Variant of adenylate kinase
MHHHHHHGGSGMGAYLVFLGPPGAGKGTQGRRISAKTGIPHISTGDIFRDIVAKQNDEVASKIKEIMEKGELVPDELGNAVVKRRLSEKDCEKGFILDGYPRTVRQAEYLDSFLESQNRQLTAAVAFKVPEDEVVQRLLSRLICPKCGRIYNMIFLPPKEDELCDDCGVGLVQRDDDKEETVRHRLKVYLEKTQPVIDYYSKKGILKRVDGSQGIDNVVAEVLGILGWSDK

SEQ ID NO: 987 - DNA, 693 bp, synthetic construct
  misc_feature 1..693: note = Variant of adenylate kinase
  source 1..693: mol_type = other DNA
atgcaccatcatcaccatcacgggggctccggcatgggggcatatctggtgttcttaggtccgccgggcgcgggaaaaggtacccaaggccgtcgcatttcggcaaagactggcatcccgcatattagcacgggcgatatcttccgtgacatcgtcgctaagcaaaacgatgaagttgcctcgaaaattaaagagatcatgctgaaaggtgaactcgttccagatgaactgggtaatgcgctggtcaaacgccgcctgtcggagaaagactgcgaaaaaggctttattttggatggttatccgcgtaccgtgcgccaagcggaatatctggatagttttcttgaaagccagaatcgccagttgacagccgccgtggccttcaaagtccccgaagatgaagttgttcagcgtctgctgtctcgcctgatctgtccgaaatgcgggcgtatctacaacatgatttttctgccaccaaaagaagacgagctgtgtgacgattgcggtgtcggcttagtacagcgtgatgatgataaggaagaaacggtccgtcaccgcctgaaagtctaccttgagaagacccagccggtcattgactattatagtaagaaaggtattctcaaacgcgtagatgggtcgcaaggaatcgacaacgttgttgcagaagtcctggggattctgggttggagcgataag

SEQ ID NO: 988 - protein, 231 aa, synthetic construct
  REGION 1..231: note = Variant of adenylate kinase
MHHHHHHGGSGMGAYLVFLGPPGAGKGTQGRRISAKTGIPHISTGDIFRDIVAKQNDEVASKIKEIMLKGELVPDELGNALVKRRLSEKDCEKGFILDGYPRTVRQAEYLDSFLESQNRQLTAAVAFKVPEDEVVQRLLSRLICPKCGRIYNMIFLPPKEDELCDDCGVGLVQRDDDKEETVRHRLKVYLEKTQPVIDYYSKKGILKRVDGSQGIDNVVAEVLGILGWSDK

SEQ ID NO: 989 - DNA, 693 bp, synthetic construct
  misc_feature 1..693: note = Variant of adenylate kinase
  source 1..693: mol_type = other DNA
atgcaccatcatcaccatcacgggggctccggcatgggggcatatctggtgttcttaggtccgccgggcgcgggaaaaggtacccaaggccgtcgcatttcggcaaagactggcatcccgcatattagcacgggcgatatctttcgtgacatcgtcgctaagcaaaacgatgaagttgcctcgaaaattaaagagatcatggagaaaggtgaactcgttccagatgaaatgggtaatgcggtagtaaaacgccgcctgtcggagaaagactgcgaaaaaggctttattttggatggttatccgcgtaccgtgcgccaagcggaatatctggatagttttcttgaaagccagaatcgccagttgacagccgccgtgctgttcaaagtccccgaagatgaagttcgccagcgtctgctgtctcgcctgatctgtccgaaatgcgggcgtatctacaacatgatttttctgccaccaaaagaagacgagctgtgtgacgattgcggtgtcggcttagtacagcgtgatgatgataaggaagaaacggtccgtcaccgcctgaaagtctaccttgagaagacccagccggtcattgactattatagtaagaaaggtattctcaaacgcgtagatgggtcgcaaggaatcgacaacgttgtggcagaagtcctggggattctgggttggagcgataag

SEQ ID NO: 990 - protein, 231 aa, synthetic construct
  REGION 1..231: note = Variant of adenylate kinase
MHHHHHHGGSGMGAYLVFLGPPGAGKGTQGRRISAKTGIPHISTGDIFRDIVAKQNDEVASKIKEIMEKGELVPDEMGNAVVKRRLSEKDCEKGFILDGYPRTVRQAEYLDSFLESQNRQLTAAVLFKVPEDEVRQRLLSRLICPKCGRIYNMIFLPPKEDELCDDCGVGLVQRDDDKEETVRHRLKVYLEKTQPVIDYYSKKGILKRVDGSQGIDNVVAEVLGILGWSDK

SEQ ID NO: 991 - DNA, 693 bp, synthetic construct
  misc_feature 1..693: note = Variant of adenylate kinase
  source 1..693: mol_type = other DNA
atgcaccatcatcaccatcacgggggctccggcatgggggcatatctggtgttcttaggtccgccgggcgcgggaaaaggtacccaaggccgtcgcatttcggcaaagactggcatcccgcatattagcacgggcgatatctttcgtgacatcgtcgctaagcaaaacgatgaagttgcctcgaaaattaaagagatcatggagaaaggtgaactcgttccagatgaactgggtaatgcggtagtaaaacgccgcctgtcggagaaagactgcgaaaaaggctttattttggatggttatccgcgtaccgtgcgccaagcggaatatctggatagttttcttgaaagccagaatcgccagttgacagccgccgtgctgttcaaagtccccgaagatgaagttcgcctgcgtctgctgtctcgcctgatctgtccgaaatgcgggcgtatctacaacatgatttttctgccaccaaaagaagacgagctgtgtgacgattgcggtgtcggcttagtacagcgtgatgatgataaggaagaaacggtccgtcaccgcctgaaagtctaccttgagaagacccagccggtcattgactattatagtaagaaaggtattctcaaacgcgtagatgggtcgcaaggaatcgacaacgttgtggcagaagtcctggggattctgggttggagcgataag

SEQ ID NO: 992 - protein, 231 aa, synthetic construct
  REGION 1..231: note = Variant of adenylate kinase
MHHHHHHGGSGMGAYLVFLGPPGAGKGTQGRRISAKTGIPHISTGDIFRDIVAKQNDEVASKIKEIMEKGELVPDELGNAVVKRRLSEKDCEKGFILDGYPRTVRQAEYLDSFLESQNRQLTAAVLFKVPEDEVRLRLLSRLICPKCGRIYNMIFLPPKEDELCDDCGVGLVQRDDDKEETVRHRLKVYLEKTQPVIDYYSKKGILKRVDGSQGIDNVVAEVLGILGWSDK

SEQ ID NO: 993 - DNA, 693 bp, synthetic construct
  misc_feature 1..693: note = Variant of adenylate kinase
  source 1..693: mol_type = other DNA
atgcaccatcatcaccatcacgggggctccggcatgggggcatatctggtgttcttaggtccgccgggcgcgggaaaaggtacccaaggccgtcgcatttcggcaaagactggcatcccgcatattagcacgggcgatatctttcgtgacatcgtcgctaagcaaaacgatgaagttgcctcgaaaattaaagagatcatggagaaaggtgaactcgttccagatgaaatgggtaatgcggtagtaaaacgccgcctgtcggagaaagactgcgaaaaaggctttattttggatggttatccgcgtaccgtgcgccaagcggaatatctggatagttttcttgaaagccagaatcgccagttgacagccgccgtgctgttcaaagtccccgaagatgaagttgttctgcgtctgctgtctcgcctgatctgtccgaaatgcgggcgtatctacaacatgatttttctgccaccaaaagaagacgagctgtgtgacgattgcggtgtcggcttagtacagcgtgatgatgataaggaagaaacggtccgtcaccgcctgaaagtctaccttgagaagacccagccggtcattgactattatagtaagaaaggtattctcaaacgcgtagatgggtcgcaaggaatcgacaacgttgttgcagaagtcctggggattctgggttggagcgataag

SEQ ID NO: 994 - protein, 231 aa, synthetic construct
  REGION 1..231: note = Variant of adenylate kinase
MHHHHHHGGSGMGAYLVFLGPPGAGKGTQGRRISAKTGIPHISTGDIFRDIVAKQNDEVASKIKEIMEKGELVPDEMGNAVVKRRLSEKDCEKGFILDGYPRTVRQAEYLDSFLESQNRQLTAAVLFKVPEDEVVLRLLSRLICPKCGRIYNMIFLPPKEDELCDDCGVGLVQRDDDKEETVRHRLKVYLEKTQPVIDYYSKKGILKRVDGSQGIDNVVAEVLGILGWSDK

SEQ ID NO: 995 - DNA, 693 bp, synthetic construct
  misc_feature 1..693: note = Variant of adenylate kinase
  source 1..693: mol_type = other DNA
atgcaccatcatcaccatcacgggggctccggcatgggggcatatctggtgttcttaggtccgccgggcgcgggaaaaggtacccaaggccgtcgcatttcggcaaagactggcatcccgcatattagcacgggcgatatctttcgtgacatcgtcgctaagcaaaacgatgaagttgcctcgaaaattaaagagatcatggagaaaggtgaactcgttccagatgaaatgggtaatgcggtagtaaaacgccgcctgtcggagaaagactgcgaaaaaggctttattttggatggttatccgcgtaccgtgcgccaagcggaatatctggatagttttcttgaaagccagaatcgccagttgacagccgccgtgctgttcaaagtccccgaagatgaagttgttcagcgtctgctgtctcgcctgatctgtccgaaatgcttccgtatctacaacatgatttttctgccaccaaaagaagacgagctgtgtgacgattgcggtgtcggcttagtacagcgtgatgatgataaggaagaaacggtccgtcaccgcctgaaagtctaccttgagaagacccagccggtcattgactattatagtaagaaaggtattctcaaacgcgtagatgggtcgcaaggaatcgacaacgttgttgcagaagtcctggggattctgggttggagcgataag

SEQ ID NO: 996 - protein, 231 aa, synthetic construct
  REGION 1..231: note = Variant of adenylate kinase
MHHHHHHGGSGMGAYLVFLGPPGAGKGTQGRRISAKTGIPHISTGDIFRDIVAKQNDEVASKIKEIMEKGELVPDEMGNAVVKRRLSEKDCEKGFILDGYPRTVRQAEYLDSFLESQNRQLTAAVLFKVPEDEVVQRLLSRLICPKCFRIYNMIFLPPKEDELCDDCGVGLVQRDDDKEETVRHRLKVYLEKTQPVIDYYSKKGILKRVDGSQGIDNVVAEVLGILGWSDK

SEQ ID NO: 997 - DNA, 693 bp, synthetic construct
  misc_feature 1..693: note = Variant of adenylate kinase
  source 1..693: mol_type = other DNA
atgcaccatcatcaccatcacgggggctccggcatgggggcatatctggtgttcttaggtccgccgggcgcgggaaaaggtacccaaggccgtcgcatttcggcaaagactggcatcccgcatattagcacgggcgatatcttccgtgacatcgtagctaagcaaaacgatgaagttgcctcgaaaattaaagagatcatggagaaaggtgaactcgttccagatgaactgggtaatgcggtgaccaaacgccgcctgtcggagaaagactgcgaaaaaggctttattttggatggttatccgcgtaccgtgcgccaagcggaatatctggatagttttcttgaaagccagaatcgccagttgacagccgccgtgctgttcaaagtccccgaagatgaagttgttcagcgtctgctgtctcgcctgatctgtccgaaatgcgggcgtatctacaacatgatttttctgccaccaaaagaagacgagctgtgtgacgattgcggtgtcggcttagtacagcgtgatgatgataaggaagaaacggtccgtcaccgcctgaaagtctaccttgagaagacccagccggtcattgactattatagtaagaaaggtattctcaaacgcgtagatgggtcgcaaggaatcgacaacgttgttgcagaagtcctggggattctgggttggagcgataag

SEQ ID NO: 998 - protein, 231 aa, synthetic construct
  REGION 1..231: note = Variant of adenylate kinase
MHHHHHHGGSGMGAYLVFLGPPGAGKGTQGRRISAKTGIPHISTGDIFRDIVAKQNDEVASKIKEIMEKGELVPDELGNAVTKRRLSEKDCEKGFILDGYPRTVRQAEYLDSFLESQNRQLTAAVLFKVPEDEVVQRLLSRLICPKCGRIYNMIFLPPKEDELCDDCGVGLVQRDDDKEETVRHRLKVYLEKTQPVIDYYSKKGILKRVDGSQGIDNVVAEVLGILGWSDK

SEQ ID NO: 999 - DNA, 693 bp, synthetic construct
  misc_feature 1..693: note = Variant of adenylate kinase
  source 1..693: mol_type = other DNA
atgcaccatcatcaccatcacgggggctccggcatgggggcatatctggtgttcttaggtccgccgggcgcgggaaaaggtacccaaggccgtcgcatttcggcaaagactggcatcccgcatattagcacgggcgatatcttccgtgacatcgtcgctaagcaaaacgatgaagttgcctcgaaaattaaagagatcatggagaaaggtgaactcgttccagatgaactgggtaatgcggtagtaaaacgccgcctgtcggagaaagactgcgaaaaaggctttattttggatggttatccgcgtaccgtgcgccaagcggaatatctggatagttttcttgaaagccagaatcgccagttgacagccgccgtgctgttcaaagtccccgaagatgaagttgttcagcgtgtgctgtctcgcctgatctgtccgaaatgcgggcgtatctacaacatgatttttctgccaccaaaagaagacgagctgtgtgacgattgcggtgtcggcttagtacagcgtgatgatgataaggaagaaacggtccgtgttcgcctgaaagtctaccttgagaagacccagccggtcattgactattatagtaagaaaggtattctcaaacgcgtagatgggtcgcaaggaatcgacaacgttgttgcagaagtcctggggattctgggttggagcgataag

SEQ ID NO: 1000 - protein, 231 aa, synthetic construct
  REGION 1..231: note = Variant of adenylate kinase
MHHHHHHGGSGMGAYLVFLGPPGAGKGTQGRRISAKTGIPHISTGDIFRDIVAKQNDEVASKIKEIMEKGELVPDELGNAVVKRRLSEKDCEKGFILDGYPRTVRQAEYLDSFLESQNRQLTAAVLFKVPEDEVVQRVLSRLICPKCGRIYNMIFLPPKEDELCDDCGVGLVQRDDDKEETVRVRLKVYLEKTQPVIDYYSKKGILKRVDGSQGIDNVVAEVLGILGWSDK

SEQ ID NO: 1001 - DNA, 693 bp, synthetic construct
  misc_feature 1..693: note = Variant of adenylate kinase
  source 1..693: mol_type = other DNA
atgcaccatcatcaccatcacgggggctccggcatgggggcatatctggtgttcttaggtccgccgggcgcgggaaaaggtacccaaggccgtcgcatttcggcaaagactggcatcccgcatattagcacgggcgatatctttcgtgacatcgtcgctaagcaaaacgatgaagttgcctcgaaaattaaagagatcatggagaaaggtgaactcgttccagatgaaatgggtaatgcggtagtaaaacgccgcctgtcggagaaagactgcgaaaaaggctttattttggatggttatccgcgtaccgtgcgccaagcggaatatctggatagttttcttgaaagccagaatcgccagttgacagccgccgtgctgttcaaagtccccgaagatgaagttcgcctgcgtctgctgtctcgcctgatctgtccgaaatgcgggcgtatctacaacatgatttttctgccaccaaaagaagacgagctgtgtgacgattgcggtgtcggcttagtacagcgtgatgatgataaggaagaaacggtccgtcaccgcctgaaagtctaccttgagaagacccagccggtcattgactattatagtaagaaaggtattctcaaacgcgtagatgggtcgcaaggaatcgacaacgttgttgcagaagtcctggggattctgggttggagcgataag

SEQ ID NO: 1002 - protein, 231 aa, synthetic construct
  REGION 1..231: note = Variant of adenylate kinase
MHHHHHHGGSGMGAYLVFLGPPGAGKGTQGRRISAKTGIPHISTGDIFRDIVAKQNDEVASKIKEIMEKGELVPDEMGNAVVKRRLSEKDCEKGFILDGYPRTVRQAEYLDSFLESQNRQLTAAVLFKVPEDEVRLRLLSRLICPKCGRIYNMIFLPPKEDELCDDCGVGLVQRDDDKEETVRHRLKVYLEKTQPVIDYYSKKGILKRVDGSQGIDNVVAEVLGILGWSDK

SEQ ID NO: 1003 - DNA, 693 bp, synthetic construct
  misc_feature 1..693: note = Variant of adenylate kinase
  source 1..693: mol_type = other DNA
atgcaccatcatcaccatcacgggggctccggcatgggggcatatctggtgttcttaggtccgccgggcgcgggaaaaagtacccaaggccgtcgcatttcggcaaagactggcatcccgcatattagcacgggcgatatcttccgtgacatcgtcgctaagcaaaacgatgaagttgcctcgaaaattaaagagatcatggagaaaggtgaactcgttccagatgaactgggtaatgcggtagtaaaacgccgcctgtcggagaaagactgcgaaaaaggctttattttggatggttatccgcgtaccgtgcgccaagcggaatatctggatagttttcttgaaagccagaatcgccagttgacagccgccgtgctgttcaaagtccccgaagatgaagttgttcagcgtgtgctgtctcgcctgatctgtccgaaatgcgggcgtatctacaacatgatttttctgccaccaaaagaagacgagctgtgtgacgattgcggtgtcggcttagtacagcgtgatgatgataaggaagaaacggtccgtcaccgcctgaaagtctaccttgagaagacccagccggtcattgactattatagtaagaaaggtattctcaaacgcgtagatgggtcgcaaggaatcgacaacgttgttgcagaagtcctggggattctgggttggagcgataag

SEQ ID NO: 1004 - protein, 231 aa, synthetic construct
  REGION 1..231: note = Variant of adenylate kinase
MHHHHHHGGSGMGAYLVFLGPPGAGKSTQGRRISAKTGIPHISTGDIFRDIVAKQNDEVASKIKEIMEKGELVPDELGNAVVKRRLSEKDCEKGFILDGYPRTVRQAEYLDSFLESQNRQLTAAVLFKVPEDEVVQRVLSRLICPKCGRIYNMIFLPPKEDELCDDCGVGLVQRDDDKEETVRHRLKVYLEKTQPVIDYYSKKGILKRVDGSQGIDNVVAEVLGILGWSDK

SEQ ID NO: 1005 - DNA, 693 bp, synthetic construct
  misc_feature 1..693: note = Variant of adenylate kinase
  source 1..693: mol_type = other DNA
atgcaccatcatcaccatcacgggggctccggcatgggggcatatctggtgttcttaggtccgccgggcgcgggaaaaggtacccaaggccgtcgcatttcggcaaagactggcatcccgcatattagcacgggcgatatcttccgtgacatcgtcgctaagcaaaacgatgaagttgcctcgaaaattaaagagatcatggagaaaggtgaactcgttccagatgaactgggtaatgcgctggtcaaacgccgcctgtcggagaaagactgcgaaaaaggctttattttggatggttatccgcgtaccgtgcgccaagcggaatatctggatagttttcttgaaagccagaatcgccagttgacagccgccgtgctgttcaaagtccccgaagatgaagttgttcagcgtctgctgtctcgcctgatctgtccgaaatgcgggcgtatctacaacatgatttttctgccaccaaaagaagacgagctgtgtgacgattgcggtgtcggcttagtacagcgtgatgatgataaggaagaaacggtccgtcaccgcctgaaagtctaccttgagaagacccagccggtcattgactattatagtaagaaaggtattctcaaacgcgtagatgggtcgcaaggaatcgacaacgttgttgcagaagtcctggggattctgggttggagcgataag

SEQ ID NO: 1006 - protein, 231 aa, synthetic construct
  REGION 1..231: note = Variant of adenylate kinase
MHHHHHHGGSGMGAYLVFLGPPGAGKGTQGRRISAKTGIPHISTGDIFRDIVAKQNDEVASKIKEIMEKGELVPDELGNALVKRRLSEKDCEKGFILDGYPRTVRQAEYLDSFLESQNRQLTAAVLFKVPEDEVVQRLLSRLICPKCGRIYNMIFLPPKEDELCDDCGVGLVQRDDDKEETVRHRLKVYLEKTQPVIDYYSKKGILKRVDGSQGIDNVVAEVLGILGWSDK

SEQ ID NO: 1007 - DNA, 693 bp, synthetic construct
  misc_feature 1..693: note = Variant of adenylate kinase
  source 1..693: mol_type = other DNA
atgcaccatcatcaccatcacgggggctccggcatgggggcatatctggtgttcttaggtccgccgggcgcgggaaaaggtacccaaggccgtcgcatttcggcaaagactggcatcccgcatattagcacgggcgatatcttccgtgacatcgtagctaagcaaaacgatgaagttgcctcgaaaattaaagagatcatggagaaaggtgaactcgttccagatgaactgggtaatgcgctggtcaaacgccgcctgtcggagaaagactgcgaaaaaggctttattttggatggttatccgcgtaccgtgcgccaagcggaatatctggatagttttcttgaaagccagaatcgccagttgacagccgccgtggccttcaaagtccccgaagatgaagttgttcagcgtctgctgtctcgcctgatctgtccgaaatgcgggcgtatctacaacatgatttttctgccaccaaaagaagacgagctgtgtgacgattgcggtgtcggcttagtacagcgtgatgatgataaggaagaaacggtccgtcaccgcctgaaagtctaccttgagaagacccagccggtcattgactattatagtaagaaaggtattctcaaacgcgtagatgggtcgcaaggaatcgacaacgttgttgcagaagtcctggggattctgggttggagcgataag

SEQ ID NO: 1008 - protein, 231 aa, synthetic construct
  REGION 1..231: note = Variant of adenylate kinase
MHHHHHHGGSGMGAYLVFLGPPGAGKGTQGRRISAKTGIPHISTGDIFRDIVAKQNDEVASKIKEIMEKGELVPDELGNALVKRRLSEKDCEKGFILDGYPRTVRQAEYLDSFLESQNRQLTAAVAFKVPEDEVVQRLLSRLICPKCGRIYNMIFLPPKEDELCDDCGVGLVQRDDDKEETVRHRLKVYLEKTQPVIDYYSKKGILKRVDGSQGIDNVVAEVLGILGWSDK

SEQ ID NO: 1009 - DNA, 693 bp, synthetic construct
  misc_feature 1..693: note = Variant of adenylate kinase
  source 1..693: mol_type = other DNA
atgcaccatcatcaccatcacgggggctccggcatgggggcatatctggtgttcttaggtccgccgggcgcgggaaaaagtacccaaggccgtcgcatttcggcaaagactggcatcccgcatattagcacgggcgatatcttccgtgacatcgtcgctaagcaaaacgatgaagttgcctcgaaaattaaagagatcatggagaaaggtgaactcgttccagatgaactgggtaatgcggtagtaaaacgccgcctgtcggagaaagactgcgaaaaaggctttattttggatggttatccgcgtaccgtgcgccaagcggaatatctggatagttttcttgaaagccagaatcgccagttgacagccgccgtggccttcaaagtccccgaagatgaagttgttcagcgtgtgctgtctcgcctgatctgtccgaaatgcgggcgtatctacaacatgatttttctgccaccaaaagaagacgagctgtgtgacgattgcggtgtcggcttagtacagcgtgatgatgataaggaagaaacggtccgtcatcgcctgaaagtctaccttgagaagacccagccggtcattgactattatagtaagaaaggtattctcaaacgcgtagatgggtcgcaaggaatcgacaacgttgttgcagaagtcctggggattctgggttggagcgataag

SEQ ID NO: 1010 - protein, 231 aa, synthetic construct
  REGION 1..231: note = Variant of adenylate kinase
MHHHHHHGGSGMGAYLVFLGPPGAGKSTQGRRISAKTGIPHISTGDIFRDIVAKQNDEVASKIKEIMEKGELVPDELGNAVVKRRLSEKDCEKGFILDGYPRTVRQAEYLDSFLESQNRQLTAAVAFKVPEDEVVQRVLSRLICPKCGRIYNMIFLPPKEDELCDDCGVGLVQRDDDKEETVRHRLKVYLEKTQPVIDYYSKKGILKRVDGSQGIDNVVAEVLGILGWSDK

SEQ ID NO: 1011 - DNA, 693 bp, synthetic construct
  misc_feature 1..693: note = Variant of adenylate kinase
  source 1..693: mol_type = other DNA
atgcaccatcatcaccatcacgggggctccggcatgggggcatatctggtgttcttaggtccgccgggcgcgggaaaaggtacccaaggccgtcgcatttcggcaaagactggcatcccgcatattagcacgggcgatatcttccgtgacatcgtcgctaagcaaaacgatgaagttgcctcgaaaattaaagagatcatggcgaaaggtgaactcgttccagatgaactgggtaatgcggtggtcaaacgccgcctgtcggagaaagactgcgaaaaaggctttattttggatggttatccgcgtaccgtgcgccaagcggaatatctggatagttttcttgaaagccagaatcgccagttgacagccgccgtgctgttcaaagtccccgaagatgaagttgttcagcgtctgctgtctcgcctgatctgtccgaaatgcgggcgtatctacaacatgatttttctgccaccaaaagaagacgagctgtgtgacgattgcggtgtcggcttagtacagcgtgatgatgataaggaagaaacggtccgtcaccgcctgaaagtctaccttgagaagacccagccggtcattgactattatagtaagaaaggtattctcaaacgcgtagatgggtcgcaaggaatcgacaacgttgttgcagaagtcctggggattctgggttggagcgataag

SEQ ID NO: 1012 - protein, 231 aa, synthetic construct
  REGION 1..231: note = Variant of adenylate kinase
MHHHHHHGGSGMGAYLVFLGPPGAGKGTQGRRISAKTGIPHISTGDIFRDIVAKQNDEVASKIKEIMAKGELVPDELGNAVVKRRLSEKDCEKGFILDGYPRTVRQAEYLDSFLESQNRQLTAAVLFKVPEDEVVQRLLSRLICPKCGRIYNMIFLPPKEDELCDDCGVGLVQRDDDKEETVRHRLKVYLEKTQPVIDYYSKKGILKRVDGSQGIDNVVAEVLGILGWSDK

SEQ ID NO: 1013 - DNA, 693 bp, synthetic construct
  misc_feature 1..693: note = Variant of adenylate kinase
  source 1..693: mol_type = other DNA
atgcaccatcatcaccatcacgggggctccggcatgggggcatatctggtgttcttaggtccgccgggcgcgggaaaaggtacccaaggccgtcgcatttcggcaaagactggcatcccgcatattagcacgggcgatatcttccgtgacatcgtcgctaagcaaaacgatgaagttgcctcgaaaattaaagagatcatggagaaaggtgaactcgttccagatgaactgggtaatgcgctggtcaaacgccgcctgtcggagaaagactgcgaaaaaggctttattttggatggttatccgcgtaccgtgcgccaagcggaatatctggatagttttcttgaaagccagaatcgccagttgacagccgccgtgctgttcaaagtccccgaagatgaagttgttcagcgtgtgctgtctcgcctgatctgtccgaaatgcgggcgtatctacaacatgatttttctgccaccaaaagaagacgagctgtgtgacgattgcggtgtcggcttagtacagcgtgatgatgataaggaagaaacggtccgtcatcgcctgaaagtctaccttgagaagacccagccggtcattgactattatagtaagaaaggtattctcaaacgcgtagatgggtcgcaaggaatcgacaacgttgttgcagaagtcctggggattctgggttggagcgataag

SEQ ID NO: 1014 - protein, 231 aa, synthetic construct
  REGION 1..231: note = Variant of adenylate kinase
MHHHHHHGGSGMGAYLVFLGPPGAGKGTQGRRISAKTGIPHISTGDIFRDIVAKQNDEVASKIKEIMEKGELVPDELGNALVKRRLSEKDCEKGFILDGYPRTVRQAEYLDSFLESQNRQLTAAVLFKVPEDEVVQRVLSRLICPKCGRIYNMIFLPPKEDELCDDCGVGLVQRDDDKEETVRHRLKVYLEKTQPVIDYYSKKGILKRVDGSQGIDNVVAEVLGILGWSDK

SEQ ID NO: 1015 - DNA, 693 bp, synthetic construct
  misc_feature 1..693: note = Variant of adenylate kinase
  source 1..693: mol_type = other DNA
atgcaccatcatcaccatcacgggggctccggcatgggggcatatctggtgttcttaggtccgccgggcgcgggaaaaggtacccaaggccgtattatttcggcaaagactggcatcccgcatattagcacgggcgatatcctgcgtgacatcgtcgctaagcaaaacgatgaagtttcgtcgaaaattaaagagatcatggagaaaggtgaactcgttccagatgaactgggtaatgcggtggtaaaacgccgcctgtcggagaaagactgcgaaaaaggctttattttggatggtttcccgcgtaccgtgcgccaagcggaatatctggatagttttcttgaaagccagaatcgccagttgacagccgccgtgctgttcaaagtccccgaagatgaagttaaacagcgtctgctgtctcgcctgatctgtccgaaatgcgggcgtatctacaacatgatttttctgccaccaaaagaagacgagctgtgtgacgattgcggtgtcggcttagtacagcgtttagatgataaggaagaaacggtccgtcaccgcctgaaagtctaccttgagaagacccagccggtcattgactattatagtaagaaaggtattctcaaacgcgtagatgggtcgcaaggaatcgacaacgttgtggcagaagtcctgggggcgctgggttggagcgataag

SEQ ID NO: 1016 - protein, 231 aa, synthetic construct
  REGION 1..231: note = Variant of adenylate kinase
MHHHHHHGGSGMGAYLVFLGPPGAGKGTQGRIISAKTGIPHISTGDILRDIVAKQNDEVSSKIKEIMEKGELVPDELGNAVVKRRLSEKDCEKGFILDGFPRTVRQAEYLDSFLESQNRQLTAAVLFKVPEDEVKQRLLSRLICPKCGRIYNMIFLPPKEDELCDDCGVGLVQRLDDKEETVRHRLKVYLEKTQPVIDYYSKKGILKRVDGSQGIDNVVAEVLGALGWSDK

SEQ ID NO: 1017 - DNA, 693 bp, synthetic construct
  misc_feature 1..693: note = Variant of adenylate kinase
  source 1..693: mol_type = other DNA
atgcaccatcatcaccatcacgggggctccggcatgggggcatatctggtgttcttaggtccgccgggcgcgggaaaaggtacccaaggccgtattatttcggcaaagactggcatcccgcatattagcacgggcgatatcctgcgtgacatcgtcgctaagcaaaacgatgaagttgcgtcgaaaattaaagagatcatggagaaaggtgaactcgttccagatgaactgggtaatgcgctggtaaaacgccgcctgtcggagaaagactgcgaaaaaggctttattttggatggtttcccgcgtaccgtgcgccaagcggaatatctggatagttttcttgaaagccagaatcgccagttgacagccgccgtgctgattaacgtccccgaagatgaagttaaacagcgtctgctgtctcgcctgatctgtccgaaatgcgggcgtatctacaacatgatttttctgccaccaaaagaagacgagctgtgtgacgattgcggtgtcggcttagtacagcgtttagatgataaggaagaaacggtccgtcaccgcctgaaagtctaccttgagaagacccagccggtcattgactattatagtaagaaaggtattctcaaacgcgtagatgggtcgcaaggaatcgacaacgttgtggcagaagtcctgggggcgctgggttggagcgataag

SEQ ID NO: 1018 - protein, 231 aa, synthetic construct
  REGION 1..231: note = Variant of adenylate kinase
MHHHHHHGGSGMGAYLVFLGPPGAGKGTQGRIISAKTGIPHISTGDILRDIVAKQNDEVASKIKEIMEKGELVPDELGNALVKRRLSEKDCEKGFILDGFPRTVRQAEYLDSFLESQNRQLTAAVLINVPEDEVKQRLLSRLICPKCGRIYNMIFLPPKEDELCDDCGVGLVQRLDDKEETVRHRLKVYLEKTQPVIDYYSKKGILKRVDGSQGIDNVVAEVLGALGWSDK

SEQ ID NO: 1019 - DNA, 693 bp, synthetic construct
  misc_feature 1..693: note = Variant of adenylate kinase
  source 1..693: mol_type = other DNA
atgcaccatcatcaccatcacgggggctccggcatgggggcatatctggtgttcttaggtccgccgggcgcgggaaaaggtacccaaggccgtcgcatttcggcaaagactggcatcccgcatattagcacgggcgatatcctgcgtgacatcgtcgctaagcaaaacgatgaagttgcctcgaaaattaaagagatcatggagaaaggtgaactcgttccagatgaactgggtaatgcggtggtaagccgccgcctgtcggagaaagactgcgaaaaaggctttattttggatggtttcccgcgtaccgtgcgccaagcggaatatctggatagttttcttgaaagccagaatcgccagttgacagccgccgtgctgtttaaagtccccgaagatgaagttgttcagcgtctgctgtctcgcctgatctgtccgaaatgcgggcgtatctacaacatgatttttctgccaccaaaagaagacgagctgtgtgacgattgcggtgtcggcttagtacagcgttttgatgataaggaagaaacggtccgtcaccgcctgaaagtctaccttgagaagacccagccggtcattgactattatagtaagaaaggtattctcaaacgcgtagatgggtcgcaaggaatcgacaacgttgtggcagaagtcctgggggcgctgggttggagcgataag

SEQ ID NO: 1020 - protein, 231 aa, synthetic construct
  REGION 1..231: note = Variant of adenylate kinase
MHHHHHHGGSGMGAYLVFLGPPGAGKGTQGRRISAKTGIPHISTGDILRDIVAKQNDEVASKIKEIMEKGELVPDELGNAVVSRRLSEKDCEKGFILDGFPRTVRQAEYLDSFLESQNRQLTAAVLFKVPEDEVVQRLLSRLICPKCGRIYNMIFLPPKEDELCDDCGVGLVQRFDDKEETVRHRLKVYLEKTQPVIDYYSKKGILKRVDGSQGIDNVVAEVLGALGWSDK

SEQ ID NO: 1021 - DNA, 693 bp, synthetic construct
  misc_feature 1..693: note = Variant of adenylate kinase
  source 1..693: mol_type = other DNA
atgcaccatcatcaccatcacgggggctccggcatgggggcatatctggtgttcttaggtccgccgggcgcgggaaaaggtacccaaggccgtcgcatttcggcaaagactggcatcccgcatattagcacgggcgatatcctgcgtgacatcgtcgctaagcaaaacgatgaagttgcctcgaaaattaaagagatcatggagaaaggtgaactcgttccagatgaactgggtaatgcggtagtaaaacgccgcctgtcggagaaagactgcgaaaaaggctttattttggatggtttcccgcgtaccgtgcgccaagcggaatatctggatagttttcttgaaagccagaatcgccagttgacagccgccgtgctgttcaaagtccccgaagatgaagttaaacagcgtctgctgtctcgcctgatctgtccgaaatgcgggcgtatctacaacatgatttttctgccaccaaaagaagacgagctgtgtgacgattgcggtgtcggcttagtacagcgtttagatgataaggaagaaacggtccgtcaccgcctgaaagtctaccttgagaagacccagccggtcattgactattatagtaagaaaggtattctcaaacgcgtagatgggtcgcaaggaatcgacaacgttgtggcagaagtcctgggggcgctgggttggagcgataag

SEQ ID NO: 1022 - protein, 231 aa, synthetic construct
  REGION 1..231: note = Variant of adenylate kinase
MHHHHHHGGSGMGAYLVFLGPPGAGKGTQGRRISAKTGIPHISTGDILRDIVAKQNDEVASKIKEIMEKGELVPDELGNAVVKRRLSEKDCEKGFILDGFPRTVRQAEYLDSFLESQNRQLTAAVLFKVPEDEVKQRLLSRLICPKCGRIYNMIFLPPKEDELCDDCGVGLVQRLDDKEETVRHRLKVYLEKTQPVIDYYSKKGILKRVDGSQGIDNVVAEVLGALGWSDK

SEQ ID NO: 1023 - DNA, 693 bp, synthetic construct
  misc_feature 1..693: note = Variant of adenylate kinase
  source 1..693: mol_type = other DNA
atgcaccatcatcaccatcacgggggctccggcatgggggcatatctggtgttcttaggtcctccgggcgcgggaaaaggtacccaaggccgtcgcatttcggcaaagactggcatcccgcatattagcacgggcgatatcctgcgtgacatcgtcgctacacagaacgatgaagttgcctcgaaaattaaagagatcatggagaaaggtgaactcgttccagatgaactgggtaatgcggtagtaaaacaccgcctgtcggagaaagactgcgaaaaaggctttattttggatggtttcccgcgtaccgtgcgccaagcggaatatctggatagttttcttgaaagccagaatcgccagttgacagccgccgtgctgttcaaagtccccgaagatgaagttgttcagcgtctgctgtctcgcctgatctgtccgaaatgcgggcgtatctacaacatgatttttctgccaccaaaagaagacgagctgtgtgacgattgcggtgtcggcttagtacagcgtgatgatgataaggaagaaacggtccgtcaccgcctgaaagtctaccgtgagaagacccagccggtcattgactattatagtaagaaaggtattctcaaacgcgtagatgggagccaaggaatcgacaacgttgtggcagaagtcctggggattctgggttggagcgataag

SEQ ID NO: 1024 - protein, 231 aa, synthetic construct
  REGION 1..231: note = Variant of adenylate kinase
MHHHHHHGGSGMGAYLVFLGPPGAGKGTQGRRISAKTGIPHISTGDILRDIVATQNDEVASKIKEIMEKGELVPDELGNAVVKHRLSEKDCEKGFILDGFPRTVRQAEYLDSFLESQNRQLTAAVLFKVPEDEVVQRLLSRLICPKCGRIYNMIFLPPKEDELCDDCGVGLVQRDDDKEETVRHRLKVYREKTQPVIDYYSKKGILKRVDGSQGIDNVVAEVLGILGWSDK

SEQ ID NO: 1025 - DNA, 693 bp, synthetic construct
  misc_feature 1..693: note = Variant of adenylate kinase
  source 1..693: mol_type = other DNA
atgcaccatcatcaccatcacgggggctccggcatgggggcatatctggtgttcttaggtcctccgggcgcgggaaaaggtacccaaggccgtcgcatttcggcaaagactggcatcccgcatattagcacgggcgatatcctgcgtgacatcgtcgctaaaagcaacgatgaagttgcctcgaaaattaaagagatcatggagaaaggtgaactcgttccagatgaactgggcaatgcggtagtaaaacgccgcctgtcggagaaagactgcgaaaaaggctttattttggatggtttcccgcgtaccgtgcgccaagcggaatatctggatagttttcttgaaagccagaatcgccagttgacagccgccgtgctgttcaaagtccccgaagatgaagttgttcagcgtctgctgtctcgcctgatctgtccgaaatgcgggcgtatctacaacatgatttttctgccaccaaaagaagacgagctgtgtgacgattgcggtgtcggcttagtacagcgtgatgatgataaggaagaaacggtccgtcaccgcctgaaagtctaccatgagaagacccagccggtcattgactattatagtaagaaaggtattctcaaacgcgtagatgggaaccaaggaatcgacaacgttgtggcagaagtcctggggattctgggttggagcgataag

SEQ ID NO: 1026 - protein, 231 aa, synthetic construct
  REGION 1..231: note = Variant of adenylate kinase
MHHHHHHGGSGMGAYLVFLGPPGAGKGTQGRRISAKTGIPHISTGDILRDIVAKSNDEVASKIKEIMEKGELVPDELGNAVVKRRLSEKDCEKGFILDGFPRTVRQAEYLDSFLESQNRQLTAAVLFKVPEDEVVQRLLSRLICPKCGRIYNMIFLPPKEDELCDDCGVGLVQRDDDKEETVRHRLKVYHEKTQPVIDYYSKKGILKRVDGNQGIDNVVAEVLGILGWSDK

SEQ ID NO: 1027 - DNA, 693 bp, synthetic construct
  misc_feature 1..693: note = Variant of adenylate kinase
  source 1..693: mol_type = other DNA
atgcaccatcatcaccatcacgggggctccggcatgggggcatatctggtgttcttaggtccgccgggcgcgggaaaaggtacccaaggccgtattatttcggcaaagactggcatcccgcatattagcacgggcgatatcctgcgtgacatcgtcgctaagcaaaacgatgaagtttcgtcgaaaattaaagagatcatggagaaaggtgaactcgttccagatgaactgggtaatgcgctggtaagccgccgcctgtcggagaaagactgcgaaaaaggctttattttggatggtttcccgcgtaccgtgcgccaagcggaatatctggatagttttcttgaaagccagaatcgccagttgacagccgccgtgctgattaacgtccccgaagatgaagttaaacagcgtctgctgtctcgcctgatctgtccgaaatgcgggcgtatctacaacatgatttttctgccaccaaaagaagacgagctgtgtgacgattgcggtgtcggcttagtacagcgtgatgatgataaggaagaaacggtccgtcaccgcctgaaagtctaccttgagaagacccagccggtcattgactattatagtaagaaaggtattctcaaacgcgtagatgggtcgcaaggaatcgacaacgttgtggcagaagtcctgggggcgctgggttggagcgataag

SEQ ID NO: 1028 - protein, 231 aa, synthetic construct
  REGION 1..231: note = Variant of adenylate kinase
MHHHHHHGGSGMGAYLVFLGPPGAGKGTQGRIISAKTGIPHISTGDILRDIVAKQNDEVSSKIKEIMEKGELVPDELGNALVSRRLSEKDCEKGFILDGFPRTVRQAEYLDSFLESQNRQLTAAVLINVPEDEVKQRLLSRLICPKCGRIYNMIFLPPKEDELCDDCGVGLVQRDDDKEETVRHRLKVYLEKTQPVIDYYSKKGILKRVDGSQGIDNVVAEVLGALGWSDK

SEQ ID NO: 1029 - DNA, 693 bp, synthetic construct
  misc_feature 1..693: note = Variant of adenylate kinase
  source 1..693: mol_type = other DNA
atgcaccatcatcaccatcacgggggctccggcatgggggcatatctggtgttcttaggtccgccgggcgcgggaaaaggtacccaaggccgtcgcatttcggcaaagactggcatcccgcatattagcacgggcgatatcctgcgtgacatcgtcgctaagcaaaacgatgaagttgcctcgaaaattaaagagatcatggagaaaggtgaactcgttccagatgaactgggtaatgcggtagtaaaacgccgcctgtcggagaaagactgcgaaaaaggctttattttggatggtttcccgcgtaccgtgcgccaagcggaatatctggatagttttcttgaaagccagaatcgccagttgacagccgccgtgctgttcaaagtccccgaagatgaagttgttcagcgtctgctgtctcgcctgatctgtccgaaatgcgggcgtatctacaacatgatttttctgccaccaaaagaagacgagctgtgtgacgattgcggtgtcggcttagtacagcgttttgatgataaggaagaaacggtccgtcaccgcctgaaagtctaccttgagaagacccagccggtcattgactattatagtaagaaaggtattctcaaacgcgtagatgggtcgcaaggaatcgacaacgttgtggcagaagtcctgggggcgctgggttggagcgataag

SEQ ID NO: 1030 - protein, 231 aa, synthetic construct
  REGION 1..231: note = Variant of adenylate kinase
MHHHHHHGGSGMGAYLVFLGPPGAGKGTQGRRISAKTGIPHISTGDILRDIVAKQNDEVASKIKEIMEKGELVPDELGNAVVKRRLSEKDCEKGFILDGFPRTVRQAEYLDSFLESQNRQLTAAVLFKVPEDEVVQRLLSRLICPKCGRIYNMIFLPPKEDELCDDCGVGLVQRFDDKEETVRHRLKVYLEKTQPVIDYYSKKGILKRVDGSQGIDNVVAEVLGALGWSDK

SEQ ID NO: 1031 - DNA, 693 bp, synthetic construct
  misc_feature 1..693: note = Variant of adenylate kinase
  source 1..693: mol_type = other DNA
atgcaccatcatcaccatcacgggggctccggcatgggggcatatctggtgttcttaggtccgccgggcgcgggaaaaggtacccaaggccgtattatttcggcaaagactggcatcccgcatattagcacgggcgatatcctgcgtgacatcgtcgctaagcaaaacgatgaagttgcctcgaaaattaaagagatcatggagaaaggtgaactcgttccagatgaactgggtaatgcggtagtaaaacgccgcctgtcggagaaagactgcgaaaaaggctttattttggatggtttcccgcgtaccgtgcgccaagcggaatatctggatagttttcttgaaagccagaatcgccagttgacagccgccgtgctgattaaagtccccgaagatgaagttgttcagcgtctgctgtctcgcctgatctgtccgaaatgcgggcgtatctacaacatgatttttctgccaccaaaagaagacgagctgtgtgacgattgcggtgtcggcttagtacagcgtttagatgataaggaagaaacggtccgtcaccgcctgaaagtctaccttgagaagacccagccggtcattgactattatagtaagaaaggtattctcaaacgcgtagatgggtcgcaaggaatcgacaacgttgtggcagaagtcctggggattctgggttggagcgataag

SEQ ID NO: 1032 - protein, 231 aa, synthetic construct
  REGION 1..231: note = Variant of adenylate kinase
MHHHHHHGGSGMGAYLVFLGPPGAGKGTQGRIISAKTGIPHISTGDILRDIVAKQNDEVASKIKEIMEKGELVPDELGNAVVKRRLSEKDCEKGFILDGFPRTVRQAEYLDSFLESQNRQLTAAVLIKVPEDEVVQRLLSRLICPKCGRIYNMIFLPPKEDELCDDCGVGLVQRLDDKEETVRHRLKVYLEKTQPVIDYYSKKGILKRVDGSQGIDNVVAEVLGILGWSDK

SEQ ID NO: 1033 - DNA, 693 bp, synthetic construct
  misc_feature 1..693: note = Variant of adenylate kinase
  source 1..693: mol_type = other DNA
atgcaccatcatcaccatcacgggggctccggcatgggggcatatctggtgttcttaggtcctccgggcgcgggaaaaggtacccaaggccgtcgcatttcggcaaagactggcatcccgcatattagcacgggcgatatcctgcgtgacatcgtcgctaaacagaacgatgaagttgcctcgaaaattaaagagatcatggagaaaggtgaactcgttccagatgaactgggtaatgcggtagtaaaagcgcgcctgtcggagaaagactgcgaaaaaggctttattttggatggtttcccgcgtaccgtgcgccaagcggaatatctggatagttttcttgaaagccagaatcgccagttgacagccgccgtgctgttcaaagtccccgaagatgaagtcgttcagcgtctgctgtctcgcctgatctgtccgaaatgcgggcgtatctacaacatgatttttctgccaccaaaagaagacgagctgtgtgacgattgcggtgtcggcttagtacagcgtgatgatgataaggaagaaacggtccgtcaccgcctgaaagtctaccatgagaagacccagccggtcattgactattatagtaagaaaggtattctcaaacgcgtagatgggaaccaaggaatcgacaacgttgtggcagaagtcctggggattctgggttggagcgataag

SEQ ID NO: 1034 - protein, 231 aa, synthetic construct
  REGION 1..231: note = Variant of adenylate kinase
MHHHHHHGGSGMGAYLVFLGPPGAGKGTQGRRISAKTGIPHISTGDILRDIVAKQNDEVASKIKEIMEKGELVPDELGNAVVKARLSEKDCEKGFILDGFPRTVRQAEYLDSFLESQNRQLTAAVLFKVPEDEVVQRLLSRLICPKCGRIYNMIFLPPKEDELCDDCGVGLVQRDDDKEETVRHRLKVYHEKTQPVIDYYSKKGILKRVDGNQGIDNVVAEVLGILGWSDK

SEQ ID NO: 1035 - DNA, 693 bp, synthetic construct
  misc_feature 1..693: note = Variant of adenylate kinase
  source 1..693: mol_type = other DNA
atgcaccatcatcaccatcacgggggctccggcatgggggcatatctggtgttcttaggtccgccgggcgcgggaaaaggtacccaaggccgtattatttcggcaaagactggcatcccgcatattagcacgggcgatatcctgcgtgacatcgtcgctaagcaaaacgatgaagttgcctcgaaaattaaagagatcatggagaaaggtgaactcgttccagatgaactgggtaatgcggtagtaaaacgccgcctgtcggagaaagactgcgaaaaaggctttattttggatggtttcccgcgtaccgtgcgccaagcggaatatctggatagttttcttgaaagccagaatcgccagttgacagccgccgtgctgtttaacgtccccgaagatgaagttgttcagcgtctgctgtctcgcctgatctgtccgaaatgcgggcgtatctacaacatgatttttctgccaccaaaagaagacgagctgtgtgacgattgcggtgtcggcttagtacagcgttttgatgataaggaagaaacggtccgtcaccgcctgaaagtctaccttgagaagacccagccggtcattgactattatagtaagaaaggtattctcaaacgcgtagatgggtcgcaaggaatcgacaacgttgtggcagaagtcctggggattctgggttggagcgataag

SEQ ID NO: 1036 - protein, 231 aa, synthetic construct
  REGION 1..231: note = Variant of adenylate kinase
MHHHHHHGGSGMGAYLVFLGPPGAGKGTQGRIISAKTGIPHISTGDILRDIVAKQNDEVASKIKEIMEKGELVPDELGNAVVKRRLSEKDCEKGFILDGFPRTVRQAEYLDSFLESQNRQLTAAVLFNVPEDEVVQRLLSRLICPKCGRIYNMIFLPPKEDELCDDCGVGLVQRFDDKEETVRHRLKVYLEKTQPVIDYYSKKGILKRVDGSQGIDNVVAEVLGILGWSDK

SEQ ID NO: 1037 - DNA, 693 bp, synthetic construct
  misc_feature 1..693: note = Variant of adenylate kinase
  source 1..693: mol_type = other DNA
atgcaccatcatcaccatcacgggggctccggcatgggggcatatctggtgttcttaggtccgccgggcgcgggaaaaggtacccaaggccgtcgcatttcggcaaagactggcatcccgcatattagcacgggcgatatcctgcgtgacatcgtcgctaagcaaaacgatgaagttgcctcgaaaattaaagagatcatggagaaaggtgaactcgttccagatgaactgggtaatgcgctggtaaaacgccgcctgtcggagaaagactgcgaaaaaggctttattttggatggtttcccgcgtaccgtgcgccaagcggaatatctggatagttttcttgaaagccagaatcgccagttgacagccgccgtgctgttcaaagtccccgaagatgaagttgttcagcgtctgctgtctcgcctgatctgtccgaaatgcgggcgtatctacaacatgatttttctgccaccaaaagaagacgagctgtgtgacgattgcggtgtcggcttagtacagcgtttagatgataaggaagaaacggtccgtcaccgcctgaaagtctaccttgagaagacccagccggtcattgactattatagtaagaaaggtattctcaaacgcgtagatgggtcgcaaggaatcgacaacgttgtggcagaagtcctggggattctgggttggagcgataag

SEQ ID NO: 1038 - protein, 231 aa, synthetic construct
  REGION 1..231: note = Variant of adenylate kinase
MHHHHHHGGSGMGAYLVFLGPPGAGKGTQGRRISAKTGIPHISTGDILRDIVAKQNDEVASKIKEIMEKGELVPDELGNALVKRRLSEKDCEKGFILDGFPRTVRQAEYLDSFLESQNRQLTAAVLFKVPEDEVVQRLLSRLICPKCGRIYNMIFLPPKEDELCDDCGVGLVQRLDDKEETVRHRLKVYLEKTQPVIDYYSKKGILKRVDGSQGIDNVVAEVLGILGWSDK

SEQ ID NO: 1039 - DNA, 693 bp, synthetic construct
  misc_feature 1..693: note = Variant of adenylate kinase
  source 1..693: mol_type = other DNA
atgcaccatcatcaccatcacgggggctccggcatgggggcatatctggtgttcttaggtccgccgggcgcgggaaaaggtacccaaggccgtcgcatttcggcaaagactggcatcccgcatattagcacgggcgatatcctgcgtgacatcgtcgctaagcaaaacgatgaagttgcgtcgaaaattaaagagatcatggagaaaggtgaactcgttccagatgaactgggtaatgcgctggtaaaacgccgcctgtcggagaaagactgcgaaaaaggctttattttggatggtttcccgcgtaccgtgcgccaagcggaatatctggatagttttcttgaaagccagaatcgccagttgacagccgccgtgctgttcaaagtccccgaagatgaagttgttcagcgtctgctgtctcgcctgatctgtccgaaatgcgggcgtatctacaacatgatttttctgccaccaaaagaagacgagctgtgtgacgattgcggtgtcggcttagtacagcgttttgatgataaggaagaaacggtccgtcaccgcctgaaagtctaccttgagaagacccagccggtcattgactattatagtaagaaaggtattctcaaacgcgtagatgggtcgcaaggaatcgacaacgttgtggcagaagtcctggggattctgggttggagcgataag

SEQ ID NO: 1040 - protein, 231 aa, synthetic construct
  REGION 1..231: note = Variant of adenylate kinase
MHHHHHHGGSGMGAYLVFLGPPGAGKGTQGRRISAKTGIPHISTGDILRDIVAKQNDEVASKIKEIMEKGELVPDELGNALVKRRLSEKDCEKGFILDGFPRTVRQAEYLDSFLESQNRQLTAAVLFKVPEDEVVQRLLSRLICPKCGRIYNMIFLPPKEDELCDDCGVGLVQRFDDKEETVRHRLKVYLEKTQPVIDYYSKKGILKRVDGSQGIDNVVAEVLGILGWSDK

SEQ ID NO: 1041 - DNA, 693 bp, synthetic construct
  misc_feature 1..693: note = Variant of adenylate kinase
  source 1..693: mol_type = other DNA
atgcaccatcatcaccatcacgggggctccggcatgggggcatatctggtgttcttaggtcgtccgggcgcgggaaaaggtacccaaggccgtcgcatttcggcaaagactggcatcccgcatattagcacgggcgatatcctgcgtgacatcgtcgctacacagaacgatgaagttgcctcgaaaattaaagagatcatggagaaaggtgaactcgttccagatgaactgggcaatgcggtagtaaaacgccgcctgtcggagaaagactgcgaaaaaggctttattttggatggtttcccgcgtaccgtgcgccaagcggaatatctggatagttttcttgaaagccagaatcgccagttgacagccgccgtgctgttcaaagtccccgaagatgaagttgttcagcgtctgctgtctcgcctgatctgtccgaaatgcgggcgtatctacaacatgatttttctgccaccaaaagaagacgagctgtgtgacgattgcggtgtcggcttagtacagcgtgatgatgataaggaagaaacggtccgtcaccgcctgaaagtctaccttgagaagacccagccggtcattgactattatagtaagaaaggtattctcaaacgcgtagatgggtcgcaaggaatcgacaacgttgtggcagaagtcctggggattctgggttggagcgataag

SEQ ID NO: 1042 - protein, 231 aa, synthetic construct
  REGION 1..231: note = Variant of adenylate kinase
MHHHHHHGGSGMGAYLVFLGRPGAGKGTQGRRISAKTGIPHISTGDILRDIVATQNDEVASKIKEIMEKGELVPDELGNAVVKRRLSEKDCEKGFILDGFPRTVRQAEYLDSFLESQNRQLTAAVLFKVPEDEVVQRLLSRLICPKCGRIYNMIFLPPKEDELCDDCGVGLVQRDDDKEETVRHRLKVYLEKTQPVIDYYSKKGILKRVDGSQGIDNVVAEVLGILGWSDK

SEQ ID NO: 1043 - DNA, 693 bp, synthetic construct
  misc_feature 1..693: note = Variant of adenylate kinase
  source 1..693: mol_type = other DNA
atgcaccatcatcaccatcacgggggctccggcatgggggcatatctggtgttcttaggtcctccgggcgcgggaaaaggtacccaaggccgtcgcatttcggcaaagactggcatcccgcatattagcacgggcgatatcctgcgtgacatcgtcgctacaagcaacgatgaagttgcctcgaaaattaaagagatcatggagaaaggtgaactcgttccagatgaactgggcaatgcggtagtaaaacgccgcctgtcggagaaagactgcgaaaaaggctttattttggatggtttcccgcgtaccgtgcgccaagcggaatatctggatagttttcttgaaagccagaatcgccagttgacagccgccgtgctgttcaaagtccccgaagatgaagttgttcagcgtctgctgtctcgcctgatctgtccgaaatgcgggcgtatctacaacatgatttttctgccaccaaaagaagacgagctgtgtgacgattgcggtgtcggcttagtacagcgtgatgatgataaggaagaaacggtccgtcaccgcctgaaagtctaccttgagaagacccagccggtcattgactattatagtaagaaaggtattctcaaacgcgtagatgggaaccaaggaatcgacaacgttgtggcagaagtcctggggattctgggttggagcgataag

SEQ ID NO: 1044 - protein, 231 aa, synthetic construct
  REGION 1..231: note = Variant of adenylate kinase
MHHHHHHGGSGMGAYLVFLGPPGAGKGTQGRRISAKTGIPHISTGDILRDIVATSNDEVASKIKEIMEKGELVPDELGNAVVKRRLSEKDCEKGFILDGFPRTVRQAEYLDSFLESQNRQLTAAVLFKVPEDEVVQRLLSRLICPKCGRIYNMIFLPPKEDELCDDCGVGLVQRDDDKEETVRHRLKVYLEKTQPVIDYYSKKGILKRVDGNQGIDNVVAEVLGILGWSDK

SEQ ID NO: 1045 - DNA, 693 bp, synthetic construct
  misc_feature 1..693: note = Variant of adenylate kinase
  source 1..693: mol_type = other DNA
atgcaccatcatcaccatcacgggggctccggcatgggggcatatctggtgttcttaggtccgccgggcgcgggaaaaggtacccaaggccgtattatttcggcaaagactggcatcccgcatattagcacgggcgatatcctgcgtgacatcgtcgctaagcaaaacgatgaagttgcctcgaaaattaaagagatcatggagaaaggtgaactcgttccagatgaactgggtaatgcggtggtaaaacgccgcctgtcggagaaagactgcgaaaaaggctttattttggatggtttcccgcgtaccgtgcgccaagcggaatatctggatagttttcttgaaagccagaatcgccagttgacagccgccgtgctgtttaaagtccccgaagatgaagttgttcagcgtctgctgtctcgcctgatctgtccgaaatgcgggcgtatctacaacatgatttttctgccaccaaaagaagacgagctgtgtgacgattgcggtgtcggcttagtacagcgtttagatgataaggaagaaacggtccgtcaccgcctgaaagtctaccttgagaagacccagccggtcattgactattatagtaagaaaggtattctcaaacgcgtagatgggtcgcaaggaatcgacaacgttgtggcagaagtcctgggggcgctgggttggagcgataag

SEQ ID NO: 1046 - protein, 231 aa, synthetic construct
  REGION 1..231: note = Variant of adenylate kinase
MHHHHHHGGSGMGAYLVFLGPPGAGKGTQGRIISAKTGIPHISTGDILRDIVAKQNDEVASKIKEIMEKGELVPDELGNAVVKRRLSEKDCEKGFILDGFPRTVRQAEYLDSFLESQNRQLTAAVLFKVPEDEVVQRLLSRLICPKCGRIYNMIFLPPKEDELCDDCGVGLVQRLDDKEETVRHRLKVYLEKTQPVIDYYSKKGILKRVDGSQGIDNVVAEVLGALGWSDK

SEQ ID NO: 1047 - DNA, 693 bp, synthetic construct
  misc_feature 1..693: note = Variant of adenylate kinase
  source 1..693: mol_type = other DNA
atgcaccatcatcaccatcacgggggctccggcatgggggcatatctggtgttcttaggtccgccgggcgcgggaaaaggtacccaaggccgtcgcatttcggcaaagactggcatcccgcatattagcacgggcgatatcctgcgtgacatcgtcgctaagcaaaacgatgaagttgcgtcgaaaattaaagagatcatggagaaaggtgaactcgttccagatgaactgggtaatgcggtagtaaaacgccgcctgtcggagaaagactgcgaaaaaggctttattttggatggtttcccgcgtaccgtgcgccaagcggaatatctggatagttttcttgaaagccagaatcgccagttgacagccgccgtgctgtttaacgtccccgaagatgaagttgttcagcgtctgctgtctcgcctgatctgtccgaaatgcgggcgtatctacaacatgatttttctgccaccaaaagaagacgagctgtgtgacgattgcggtgtcggcttagtacagcgttttgatgataaggaagaaacggtccgtcaccgcctgaaagtctaccttgagaagacccagccggtcattgactattatagtaagaaaggtattctcaaacgcgtagatgggtcgcaaggaatcgacaacgttgtggcagaagtcctgggggcgctgggttggagcgataag

SEQ ID NO: 1048 - protein, 231 aa, synthetic construct
  REGION 1..231: note = Variant of adenylate kinase
MHHHHHHGGSGMGAYLVFLGPPGAGKGTQGRRISAKTGIPHISTGDILRDIVAKQNDEVASKIKEIMEKGELVPDELGNAVVKRRLSEKDCEKGFILDGFPRTVRQAEYLDSFLESQNRQLTAAVLFNVPEDEVVQRLLSRLICPKCGRIYNMIFLPPKEDELCDDCGVGLVQRFDDKEETVRHRLKVYLEKTQPVIDYYSKKGILKRVDGSQGIDNVVAEVLGALGWSDK

SEQ ID NO: 1049 - DNA, 693 bp, synthetic construct
  misc_feature 1..693: note = Variant of adenylate kinase
  source 1..693: mol_type = other DNA
atgcaccatcatcaccatcacgggggctccggcatgggggcatatctggtgttcttaggtcctccgggcgcgggaaaaggtacccaaggccgtcgcatttcggcaaagactggcatcccgcatattagcacgggcgatatcctgcgtgacatcgtcgctaagcaaaacgatgaagttgcctcgagcattaaagagatcatggagaaaggtgaactcgttccagatgaactgggtaatgcggtagtaaaagcgcgcctgtcggagaaagactgcgaaaaaggctttattttggatggtttcccgcgtaccgtgcgccaagcggaatatctggatagttttcttgaaagccagaatcgccagttgacagccgccgtgctgttcaaagtccccgaagatgaagttgttcagcgtctgctgtctcgcctgatctgtccgaaatgcgggcgtatctacaacatgatttttctgccaccaaaagaagacgagctgtgtgacgattgcggtgtcggcttagtacagcgtgatgatgataaggaagaaacggtccgtcaccgcctgaaagtctaccgtgagaagacccagccggtcattgactattatagtaagaaaggtattctcaaacgcgtagatgggtcgcaaggaatcgacaacgttgtggcagaagtcctggggattctgggttggagcgataag

SEQ ID NO: 1050 - protein, 231 aa, synthetic construct
  REGION 1..231: note = Variant of adenylate kinase
MHHHHHHGGSGMGAYLVFLGPPGAGKGTQGRRISAKTGIPHISTGDILRDIVAKQNDEVASSIKEIMEKGELVPDELGNAVVKARLSEKDCEKGFILDGFPRTVRQAEYLDSFLESQNRQLTAAVLFKVPEDEVVQRLLSRLICPKCGRIYNMIFLPPKEDELCDDCGVGLVQRDDDKEETVRHRLKVYREKTQPVIDYYSKKGILKRVDGSQGIDNVVAEVLGILGWSDK

SEQ ID NO: 1051 - DNA, 693 bp, synthetic construct
  misc_feature 1..693: note = Variant of adenylate kinase
  source 1..693: mol_type = other DNA
atgcaccatcatcaccatcacgggggctccggcatgggggcatatctggtgttcttaggtccgccgggcgcgggaaaaggtacccaaggccgtcgcatttcggcaaagactggcatcccgcatattagcacgggcgatatcctgcgtgacatcgtcgctaagcaaaacgatgaagttgcctcgaaaattaaagagatcatggagaaaggtgaactcgttccagatgaactgggtaatgcgctggtaaaacgccgcctgtcggagaaagactgcgaaaaaggctttattttggatggtttcccgcgtaccgtgcgccaagcggaatatctggatagttttcttgaaagccagaatcgccagttgacagccgccgtgctgtttaaagtccccgaagatgaagttatgcagcgtctgctgtctcgcctgatctgtccgaaatgcgggcgtatctacaacatgatttttctgccaccaaaagaagacgagctgtgtgacgattgcggtgtcggcttagtacagcgtgatgatgataaggaagaaacggtccgtcaccgcctgaaagtctaccttgagaagacccagccggtcattgactattatagtaagaaaggtattctcaaacgcgtagatgggtcgcaaggaatcgacaacgttgtggcagaagtcctgggggcgctgggttggagcgataag

SEQ ID NO: 1052 - protein, 231 aa, synthetic construct
  REGION 1..231: note = Variant of adenylate kinase
MHHHHHHGGSGMGAYLVFLGPPGAGKGTQGRRISAKTGIPHISTGDILRDIVAKQNDEVASKIKEIMEKGELVPDELGNALVKRRLSEKDCEKGFILDGFPRTVRQAEYLDSFLESQNRQLTAAVLFKVPEDEVMQRLLSRLICPKCGRIYNMIFLPPKEDELCDDCGVGLVQRDDDKEETVRHRLKVYLEKTQPVIDYYSKKGILKRVDGSQGIDNVVAEVLGALGWSDK

SEQ ID NO: 1053 - DNA, 693 bp, synthetic construct
  misc_feature 1..693: note = Variant of adenylate kinase
  source 1..693: mol_type = other DNA
atgcaccatcatcaccatcacgggggctccggcatgggggcatatctggtgttcttaggtcgtccgggcgcgggaaaaggtacccaaggccgtcgcatttcggcaaagactggcatcccgcatattagcacgggcgatatcctgcgtgacatcgtcgctacacagaacgatgaagttgcctcgagcattaaagagatcatggagaaaggtgaactcgttccagatgaactgggtaatgcggtagtaaaacgccgcctgtcggagaaagactgcgaaaaaggctttattttggatggtttcccgcgtaccgtgcgccaagcggaatatctggatagttttcttgaaagccagaatcgccagttgacagccgccgtgctgttcaaagtccccgaagatgaagttgttcagcgtctgctgtctcgcctgatctgtccgaaatgcgggcgtatctacaacatgatttttctgccaccaaaagaagacgagctgtgtgacgattgcggtgtcggcttagtacagcgtgatgatgataaggaagaaacggtccgtcaccgcctgaaagtctaccgtgagaagacccagccggtcattgactattatagtaagaaaggtattctcaaacgcgtagatgggaaccaaggaatcgacaacgttgtggcagaagtcctggggattctgggttggagcgataag

SEQ ID NO: 1054 - protein, 231 aa, synthetic construct
  REGION 1..231: note = Variant of adenylate kinase
MHHHHHHGGSGMGAYLVFLGRPGAGKGTQGRRISAKTGIPHISTGDILRDIVATQNDEVASSIKEIMEKGELVPDELGNAVVKRRLSEKDCEKGFILDGFPRTVRQAEYLDSFLESQNRQLTAAVLFKVPEDEVVQRLLSRLICPKCGRIYNMIFLPPKEDELCDDCGVGLVQRDDDKEETVRHRLKVYREKTQPVIDYYSKKGILKRVDGNQGIDNVVAEVLGILGWSDK

SEQ ID NO: 1055 - DNA, 693 bp, synthetic construct
  misc_feature 1..693: note = Variant of adenylate kinase
  source 1..693: mol_type = other DNA
atgcaccatcatcaccatcacgggggctccggcatgggggcatatctggtgttcttaggtccgccgggcgcgggaaaaggtacccaaggccgtcgcatttcggcaaagactggcatcccgcatattagcacgggcgatatcctgcgtgacatcgtcgctaagcaaaacgatgaagtttcgtcgaaaattaaagagatcatggagaaaggtgaactcgttccagatgaactgggtaatgcgctggtaggccgccgcctgtcggagaaagactgcgaaaaaggctttattttggatggtttcccgcgtaccgtgcgccaagcggaatatctggatagttttcttgaaagccagaatcgccagttgacagccgccgtgctgtttaaagtccccgaagatgaagttgttcagcgtctgctgtctcgcctgatctgtccgaaatgcgggcgtatctacaacatgatttttctgccaccaaaagaagacgagctgtgtgacgattgcggtgtcggcttagtacagcgtttagatgataaggaagaaacggtccgtcaccgcctgaaagtctaccttgagaagacccagccggtcattgactattatagtaagaaaggtattctcaaacgcgtagatgggtcgcaaggaatcgacaacgttgtggcagaagtcctggggattctgggttggagcgataag

SEQ ID NO: 1056 - protein, 231 aa, synthetic construct
  REGION 1..231: note = Variant of adenylate kinase
MHHHHHHGGSGMGAYLVFLGPPGAGKGTQGRRISAKTGIPHISTGDILRDIVAKQNDEVSSKIKEIMEKGELVPDELGNALVGRRLSEKDCEKGFILDGFPRTVRQAEYLDSFLESQNRQLTAAVLFKVPEDEVVQRLLSRLICPKCGRIYNMIFLPPKEDELCDDCGVGLVQRLDDKEETVRHRLKVYLEKTQPVIDYYSKKGILKRVDGSQGIDNVVAEVLGILGWSDK

SEQ ID NO: 1057 - DNA, 693 bp, synthetic construct
  misc_feature 1..693: note = Variant of adenylate kinase
  source 1..693: mol_type = other DNA
atgcaccatcatcaccatcacgggggctccggcatgggggcatatctggtgttcttaggtcctccgggcgcgggaaaaggtacccaaggccgtcgcatttcggcaaagactggcatcccgcatattagcacgggcgatatcctgcgtgacatcgtcgctaaaagcaacgatgaagttgcctcgaaaattaaagagatcatggagaaaggtgaactcgttccagatgaactgggcaatgcggtagtaaaagcgcgcctgtcggagaaagactgcgaaaaaggctttattttggatggtttcccgcgtaccgtgcgccaagcggaatatctggatagttttcttgaaagccagaatcgccagttgacagccgccgtgctgttcaaagtccccgaagatgaagttgttcagcgtctgctgtctcgcctgatctgtccgaaatgcgggcgtatctacaacatgatttttctgccaccaaaagaagacgagctgtgtgacgattgcggtgtcggcttagtacagcgtgatgatgataaggaagaaacggtccgtcaccgcctgaaagtctaccgtgagaagacccagccggtcattgactattatagtaagaaaggtattctcaaacgcgtagatgggtcgcaaggaatcgacaacgttgtggcagaagtcctggggattctgggttggagcgataag

SEQ ID NO: 1058 - protein, 231 aa, synthetic construct
  REGION 1..231: note = Variant of adenylate kinase
MHHHHHHGGSGMGAYLVFLGPPGAGKGTQGRRISAKTGIPHISTGDILRDIVAKSNDEVASKIKEIMEKGELVPDELGNAVVKARLSEKDCEKGFILDGFPRTVRQAEYLDSFLESQNRQLTAAVLFKVPEDEVVQRLLSRLICPKCGRIYNMIFLPPKEDELCDDCGVGLVQRDDDKEETVRHRLKVYREKTQPVIDYYSKKGILKRVDGSQGIDNVVAEVLGILGWSDK

SEQ ID NO: 1059 - DNA, 693 bp, synthetic construct
  misc_feature 1..693: note = Variant of adenylate kinase
  source 1..693: mol_type = other DNA
atgcaccatcatcaccatcacgggggctccggcatgggggcatatctggtgttcttaggtccgccgggcgcgggaaaaggtacccaaggccgtattatttcggcaaagactggcatcccgcatattagcacgggcgatatcctgcgtgacatcgtcgctaagcaaaacgatgaagttgcctcgaaaattaaagagatcatggagaaaggtgaactcgttccagatgaactgggtaatgcgctggtaggccgccgcctgtcggagaaagactgcgaaaaaggctttattttggatggtttcccgcgtaccgtgcgccaagcggaatatctggatagttttcttgaaagccagaatcgccagttgacagccgccgtgctgttcaaagtccccgaagatgaagttaaacagcgtctgctgtctcgcctgatctgtccgaaatgcgggcgtatctacaacatgatttttctgccaccaaaagaagacgagctgtgtgacgattgcggtgtcggcttagtacagcgtgatgatgataaggaagaaacggtccgtcaccgcctgaaagtctaccttgagaagacccagccggtcattgactattatagtaagaaaggtattctcaaacgcgtagatgggtcgcaaggaatcgacaacgttgtggcagaagtcctgggggcgctgggttggagcgataag

SEQ ID NO: 1060 - protein, 231 aa, synthetic construct
  REGION 1..231: note = Variant of adenylate kinase
MHHHHHHGGSGMGAYLVFLGPPGAGKGTQGRIISAKTGIPHISTGDILRDIVAKQNDEVASKIKEIMEKGELVPDELGNALVGRRLSEKDCEKGFILDGFPRTVRQAEYLDSFLESQNRQLTAAVLFKVPEDEVKQRLLSRLICPKCGRIYNMIFLPPKEDELCDDCGVGLVQRDDDKEETVRHRLKVYLEKTQPVIDYYSKKGILKRVDGSQGIDNVVAEVLGALGWSDK

SEQ ID NO: 1061 - DNA, 693 bp, synthetic construct
  misc_feature 1..693: note = Variant of adenylate kinase
  source 1..693: mol_type = other DNA
atgcaccatcatcaccatcacgggggctccggcatgggggcatatctggtgttcttaggtccgccgggcgcgggaaaaggtacccaaggccgtcgcatttcggcaaagactggcatcccgcatattagcacgggcgatatcctgcgtgacatcgtcgctaagcaaaacgatgaagttgcctcgaaaattaaagagatcatggagaaaggtgaactcgttccagatgaactgggtaatgcggtagtaaaacgccgcctgtcggagaaagactgcgaaaaaggctttattttggatggtttcccgcgtaccgtgcgccaagcggaatatctggatagttttcttgaaagccagaatcgccagttgacagccgccgtgctgttcaaagtccccgaagatgaagttgttcagcgtctgctgtctcgcctgatctgtccgaaatgcgggcgtatctacaacatgatttttctgccaccaaaagaagacgagctgtgtgacgattgcggtgtcggcttagtacagcgttttgatgataaggaagaaacggtccgtcaccgcctgaaagtctaccttgagaagacccagccggtcattgactattatagtaagaaaggtattctcaaacgcgtagatgggtcgcaaggaatcgacaacgttgtggcagaagtcctggggattctgggttggagcgataag

SEQ ID NO: 1062 - protein, 231 aa, synthetic construct
  REGION 1..231: note = Variant of adenylate kinase
MHHHHHHGGSGMGAYLVFLGPPGAGKGTQGRRISAKTGIPHISTGDILRDIVAKQNDEVASKIKEIMEKGELVPDELGNAVVKRRLSEKDCEKGFILDGFPRTVRQAEYLDSFLESQNRQLTAAVLFKVPEDEVVQRLLSRLICPKCGRIYNMIFLPPKEDELCDDCGVGLVQRFDDKEETVRHRLKVYLEKTQPVIDYYSKKGILKRVDGSQGIDNVVAEVLGILGWSDK

SEQ ID NO: 1063 - DNA, 693 bp, synthetic construct
  misc_feature 1..693: note = Variant of adenylate kinase
  source 1..693: mol_type = other DNA
atgcaccatcatcaccatcacgggggctccggcatgggggcatatctggtgttcttaggtcctccgggcgcgggaaaaggtacccaaggccgtcgcatttcggcaaagactggcatcccgcatattagcacgggcgatatcctgcgtgacatcgtcgctaaacagaacgatgaagttgcctcgagcattaaagagatcatggagaaaggtgaactcgttccagatgaactgggcaatgcggtagtaaaacgccgcctgtcggagaaagactgcgaaaaaggctttattttggatggtttcccgcgtaccgtgcgccaagcggaatatctggatagttttcttgaaagccagaatcgccagttgacagccgccgtgctgttcaaagtccccgaagatgaagttgttcagcgtctgctgtctcgcctgatctgtccgaaatgcgggcgtatctacaacatgatttttctgccaccaaaagaagacgagctgtgtgacgattgcggtgtcggcttagtacagcgtgatgatgataaggaagaaacggtccgtcaccgcctgaaagtctaccttgagaagacccagccggtcattgactattatagtaagaaaggtattctcaaacgcgtagatgggaaccaaggaatcgacaacgttgtggcagaagtcctggggattctgggttggagcgataag

SEQ ID NO: 1064 - protein, 231 aa, synthetic construct
  REGION 1..231: note = Variant of adenylate kinase
MHHHHHHGGSGMGAYLVFLGPPGAGKGTQGRRISAKTGIPHISTGDILRDIVAKQNDEVASSIKEIMEKGELVPDELGNAVVKRRLSEKDCEKGFILDGFPRTVRQAEYLDSFLESQNRQLTAAVLFKVPEDEVVQRLLSRLICPKCGRIYNMIFLPPKEDELCDDCGVGLVQRDDDKEETVRHRLKVYLEKTQPVIDYYSKKGILKRVDGNQGIDNVVAEVLGILGWSDK

SEQ ID NO: 1065 - DNA, 693 bp, synthetic construct
  misc_feature 1..693: note = Variant of adenylate kinase
  source 1..693: mol_type = other DNA
atgcaccatcatcaccatcacgggggctccggcatgggggcatatctggtgttcttaggtccgccgggcgcgggaaaaggtacccaaggccgtattatttcggcaaagactggcatcccgcatattagcacgggcgatatcctgcgtgacatcgtcgctaagcaaaacgatgaagttgcgtcgaaaattaaagagatcatggagaaaggtgaactcgttccagatgaactgggtaatgcgctggtaagccgccgcctgtcggagaaagactgcgaaaaaggctttattttggatggtttcccgcgtaccgtgcgccaagcggaatatctggatagttttcttgaaagccagaatcgccagttgacagccgccgtgctgtttaaagtccccgaagatgaagttgttcagcgtctgctgtctcgcctgatctgtccgaaatgcgggcgtatctacaacatgatttttctgccaccaaaagaagacgagctgtgtgacgattgcggtgtcggcttagtacagcgtgatgatgataaggaagaaacggtccgtcaccgcctgaaagtctaccttgagaagacccagccggtcattgactattatagtaagaaaggtattctcaaacgcgtagatgggtcgcaaggaatcgacaacgttgtggcagaagtcctggggattctgggttggagcgataag

SEQ ID NO: 1066 - protein, 231 aa, synthetic construct
  REGION 1..231: note = Variant of adenylate kinase
MHHHHHHGGSGMGAYLVFLGPPGAGKGTQGRIISAKTGIPHISTGDILRDIVAKQNDEVASKIKEIMEKGELVPDELGNALVSRRLSEKDCEKGFILDGFPRTVRQAEYLDSFLESQNRQLTAAVLFKVPEDEVVQRLLSRLICPKCGRIYNMIFLPPKEDELCDDCGVGLVQRDDDKEETVRHRLKVYLEKTQPVIDYYSKKGILKRVDGSQGIDNVVAEVLGILGWSDK

SEQ ID NO: 1067 - DNA, 693 bp, synthetic construct
  misc_feature 1..693: note = Variant of adenylate kinase
  source 1..693: mol_type = other DNA
atgcaccatcatcaccatcacgggggctccggcatgggggcatatctggtgttcttaggtccgccgggcgcgggaaaaggtacccaaggccgtattatttcggcaaagactggcatcccgcatattagcacgggcgatatcctgcgtgacatcgtcgctaagcaaaacgatgaagttgcctcgaaaattaaagagatcatggagaaaggtgaactcgttccagatgaactgggtaatgcgctggtaaaacgccgcctgtcggagaaagactgcgaaaaaggctttattttggatggtttcccgcgtaccgtgcgccaagcggaatatctggatagttttcttgaaagccagaatcgccagttgacagccgccgtgctgtttaaagtccccgaagatgaagttgttcagcgtctgctgtctcgcctgatctgtccgaaatgcgggcgtatctacaacatgatttttctgccaccaaaagaagacgagctgtgtgacgattgcggtgtcggcttagtacagcgtgatgatgataaggaagaaacggtccgtcaccgcctgaaagtctaccttgagaagacccagccggtcattgactattatagtaagaaaggtattctcaaacgcgtagatgggtcgcaaggaatcgacaacgttgtggcagaagtcctgggggcgctgggttggagcgataag

SEQ ID NO: 1068 - protein, 231 aa, synthetic construct
  REGION 1..231: note = Variant of adenylate kinase
MHHHHHHGGSGMGAYLVFLGPPGAGKGTQGRIISAKTGIPHISTGDILRDIVAKQNDEVASKIKEIMEKGELVPDELGNALVKRRLSEKDCEKGFILDGFPRTVRQAEYLDSFLESQNRQLTAAVLFKVPEDEVVQRLLSRLICPKCGRIYNMIFLPPKEDELCDDCGVGLVQRDDDKEETVRHRLKVYLEKTQPVIDYYSKKGILKRVDGSQGIDNVVAEVLGALGWSDK

SEQ ID NO: 1069 - DNA, 693 bp, synthetic construct
  misc_feature 1..693: note = Variant of adenylate kinase
  source 1..693: mol_type = other DNA
atgcaccatcatcaccatcacgggggctccggcatgggggcatatctggtgttcttaggtcctccgggcgcgggaaaaggtacccaaggccgtcgcatttcggcaaagactggcatcccgcatattagcacgggcgatatcctgcgtgacatcgtcgctacaagcaacgatgaagttgcctcgaaaattaaagagatcatggagaaaggtgaactcgttccagatgaactgggcaatgcggtagtaaaagcgcgcctgtcggagaaagactgcgaaaaaggctttattttggatggtttcccgcgtaccgtgcgccaagcggaatatctggatagttttcttgaaagccagaatcgccagttgacagccgccgtgctgttcaaagtccccgaagatgaagttgttcagcgtctgctgtctcgcctgatctgtccgaaatgcgggcgtatctacaacatgatttttctgccaccaaaagaagacgagctgtgtgacgattgcggtgtcggcttagtacagcgtgatgatgataaggaagaaacggtccgtcaccgcctgaaagtctaccttgagaagacccagccggtcattgactattatagtaagaaaggtattctcaaacgcgtagatgggaaccaaggaatcgacaacgttgtggcagaagtcctggggattctgggttggagcgataag

SEQ ID NO: 1070 - protein, 231 aa, synthetic construct
  REGION 1..231: note = Variant of adenylate kinase
MHHHHHHGGSGMGAYLVFLGPPGAGKGTQGRRISAKTGIPHISTGDILRDIVATSNDEVASKIKEIMEKGELVPDELGNAVVKARLSEKDCEKGFILDGFPRTVRQAEYLDSFLESQNRQLTAAVLFKVPEDEVVQRLLSRLICPKCGRIYNMIFLPPKEDELCDDCGVGLVQRDDDKEETVRHRLKVYLEKTQPVIDYYSKKGILKRVDGNQGIDNVVAEVLGILGWSDK

SEQ ID NO: 1071 - DNA, 693 bp, synthetic construct
  misc_feature 1..693: note = Variant of adenylate kinase
  source 1..693: mol_type = other DNA
atgcaccatcatcaccatcacgggggctccggcatgggggcatatctggtgttcttaggtcctccgggcgcgggaaaaggtacccaaggccgtcgcatttcggcaaagactggcatcccgcatattagcacgggcgatatcctgcgtgacatcgtcgctaaaagcaacgatgaagttgcctcgaaaattaaagagatcatggagaaaggtgaactcgttccagatgaactgggtaatgcggtagtaaaacgccgcctgtcggagaaagactgcgaaaaaggctttattttggatggtttcccgcgtaccgtgcgccaagcggaatatctggatagttttcttgaaagccagaatcgccagttgacagccgccgtgctgttcaaagtccccgaagatgaagttgttcagcgtctgctgtctcgcctgatctgtccgaaatgcgggcgtatctacaacatgatttttctgccaccaaaagaagacgagctgtgtgacgattgcggtgtcggcttagtacagcgtgatgatgataaggaagaaacggtccgtcaccgcctgaaagtctaccgtgagaagacccagccggtcattgactattatagtaagaaaggtattctcaaacgcgtagatgggagccaaggaatcgacaacgttgtggcagaagtcctggggattctgggttggagcgataag

SEQ ID NO: 1072 - protein, 231 aa, synthetic construct
  REGION 1..231: note = Variant of adenylate kinase
MHHHHHHGGSGMGAYLVFLGPPGAGKGTQGRRISAKTGIPHISTGDILRDIVAKSNDEVASKIKEIMEKGELVPDELGNAVVKRRLSEKDCEKGFILDGFPRTVRQAEYLDSFLESQNRQLTAAVLFKVPEDEVVQRLLSRLICPKCGRIYNMIFLPPKEDELCDDCGVGLVQRDDDKEETVRHRLKVYREKTQPVIDYYSKKGILKRVDGSQGIDNVVAEVLGILGWSDK

SEQ ID NO: 1073 - DNA, 693 bp, synthetic construct
  misc_feature 1..693: note = Variant of adenylate kinase
  source 1..693: mol_type = other DNA
atgcaccatcatcaccatcacgggggctccggcatgggggcatatctggtgttcttaggtccgccgggcgcgggaaaaggtacccaaggccgtcgcatttcggcaaagactggcatcccgcatattagcacgggcgatatcctgcgtgacatcgtcgctaaacagaacgatgaagttgcctcgagcattaaagagatcatggagaaaggtgaactcgttccagatgaactgggtaatgcggtagtaaaacgccgcctgtcggagaaagactgcgaaaaaggctttattttggatggtttcccgcgtaccgtgcgccaagcggaatatctggatagttttcttgaaagccagaatcgccagttgacagccgccgtgctgttcaaagtccccgaagatgaagttgttcagcgtctgctgtctcgcctgatctgtccgaaatgcgggcgtatctacaacatgatttttctgccaccaaaagaagacgagctgtgtgacgattgcggtgtcggcttagtacagcgtgatgatgataagccggaaacggtccgtcaccgcctgaaagtctaccttgagaagacccagccggtcattgactattatagtaagaaaggtattctcaaacgcgtagatgggagccaaggaatcgacaacgttgtggcagaagtcctggggattctgggttggagcgataag

SEQ ID NO: 1074 - protein, 231 aa, synthetic construct
  REGION 1..231: note = Variant of adenylate kinase
MHHHHHHGGSGMGAYLVFLGPPGAGKGTQGRRISAKTGIPHISTGDILRDIVAKQNDEVASSIKEIMEKGELVPDELGNAVVKRRLSEKDCEKGFILDGFPRTVRQAEYLDSFLESQNRQLTAAVLFKVPEDEVVQRLLSRLICPKCGRIYNMIFLPPKEDELCDDCGVGLVQRDDDKPETVRHRLKVYLEKTQPVIDYYSKKGILKRVDGSQGIDNVVAEVLGILGWSDK

SEQ ID NO: 1075 - DNA, 693 bp, synthetic construct
  misc_feature 1..693: note = Variant of adenylate kinase
  source 1..693: mol_type = other DNA
atgcaccatcatcaccatcacgggggctccggcatgggggcatatctggtgttcttaggtcctccgggcgcgggaaaaggtacccaaggccgtcgcatttcggcaaagactggcatcccgcatattagcacgggcgatatcctgcgtgacatcgtcgctaagcaaaacgatgaagttgcctcggaaattaaagagatcatggagaaaggtgaactcgttccagatgaactgggcaatgcggtagtaaaagcgcgcctgtcggagaaagactgcgaaaaaggctttattttggatggtttcccgcgtaccgtgcgccaagcggaatatctggatagttttcttgaaagccagaatcgccagttgacagccgccgtgctgttcaaagtccccgaagatgaagttgttcagcgtctgctgtctcgcctgatctgtccgaaatgcgggcgtatctacaacatgatttttctgccaccaaaagaagacgagctgtgtgacgattgcggtgtcggcttagtacagcgtgatgatgataaggaagaaacggtccgtcaccgcctgaaagtctaccatgagaagacccagccggtcattgactattatagtaagaaaggtattctcaaacgcgtagatgggtcgcaaggaatcgacaacgttgtggcagaagtcctggggattctgggttggagcgataag

SEQ ID NO: 1076 - protein, 231 aa, synthetic construct
  REGION 1..231: note = Variant of adenylate kinase
MHHHHHHGGSGMGAYLVFLGPPGAGKGTQGRRISAKTGIPHISTGDILRDIVAKQNDEVASEIKEIMEKGELVPDELGNAVVKARLSEKDCEKGFILDGFPRTVRQAEYLDSFLESQNRQLTAAVLFKVPEDEVVQRLLSRLICPKCGRIYNMIFLPPKEDELCDDCGVGLVQRDDDKEETVRHRLKVYHEKTQPVIDYYSKKGILKRVDGSQGIDNVVAEVLGILGWSDK

SEQ ID NO: 1077 - DNA, 693 bp, synthetic construct
  misc_feature 1..693: note = Variant of adenylate kinase
  source 1..693: mol_type = other DNA
atgcaccatcatcaccatcacgggggctccggcatgggggcatatctggtgttcttaggtcctccgggcgcgggaaaaggtacccaaggccgtcgcatttcggcaaagactggcatcccgcatattagcacgggcgatatcctgcgtgacatcgtcgctacacagaacgatgaagttgcctcgaaaattaaagagatcatggagaaaggtgaactcgttccagatgaactgggtaatgcggtagtaaaagcgcgcctgtcggagaaagactgcgaaaaaggctttattttggatggtttcccgcgtaccgtgcgccaagcggaatatctggatagttttcttgaaagccagaatcgccagttgacagccgccgtgctgttcaaagtccccgaagatgaagttgttcagcgtctgctgtctcgcctgatctgtccgaaatgcgggcgtatctacaacatgatttttctgccaccaaaagaagacgagctgtgtgacgattgcggtgtcggcttagtacagcgtgatgatgataagccggaaacggtccgtcaccgcctgaaagtctaccttgagaagacccagccggtcattgactattatagtaagaaaggtattctcaaacgcgtagatgggaaccaaggaatcgacaacgttgtggcagaagtcctggggattctgggttggagcgataag

SEQ ID NO: 1078 - protein, 231 aa, synthetic construct
  REGION 1..231: note = Variant of adenylate kinase
MHHHHHHGGSGMGAYLVFLGPPGAGKGTQGRRISAKTGIPHISTGDILRDIVATQNDEVASKIKEIMEKGELVPDELGNAVVKARLSEKDCEKGFILDGFPRTVRQAEYLDSFLESQNRQLTAAVLFKVPEDEVVQRLLSRLICPKCGRIYNMIFLPPKEDELCDDCGVGLVQRDDDKPETVRHRLKVYLEKTQPVIDYYSKKGILKRVDGNQGIDNVVAEVLGILGWSDK

SEQ ID NO: 1079 - DNA, 693 bp, synthetic construct
  misc_feature 1..693: note = Variant of adenylate kinase
  source 1..693: mol_type = other DNA
atgcaccatcatcaccatcacgggggctccggcatgggggcatatctggtgttcttaggtcctccgggcgcgggaaaaggtacccaaggccgtcgcatttcggcaaagactggcatcccgcatattagcacgggcgatatcctgcgtgacatcgtcgctacaagcaacgatgaagttgcctcgagcattaaagagatcatggagaaaggtgaactcgttccagatgaactgggtaatgcggtagtaaaagcgcgcctgtcggagaaagactgcgaaaaaggctttattttggatggtttcccgcgtaccgtgcgccaagcggaatatctggatagttttcttgaaagccagaatcgccagttgacagccgccgtgctgttcaaagtccccgaagatgaagttgttcagcgtctgctgtctcgcctgatctgtccgaaatgcgggcgtatctacaacatgatttttctgccaccaaaagaagacgagctgtgtgacgattgcggtgtcggcttagtacagcgtgatgatgataaggaagaaacggtccgtcaccgcctgaaagtctaccttgagaagacccagccggtcattgactattatagtaagaaaggtattctcaaacgcgtagatgggagccaaggaatcgacaacgttgtggcagaagtcctggggattctgggttggagcgataag

SEQ ID NO: 1080 - protein, 231 aa, synthetic construct
  REGION 1..231: note = Variant of adenylate kinase
MHHHHHHGGSGMGAYLVFLGPPGAGKGTQGRRISAKTGIPHISTGDILRDIVATSNDEVASSIKEIMEKGELVPDELGNAVVKARLSEKDCEKGFILDGFPRTVRQAEYLDSFLESQNRQLTAAVLFKVPEDEVVQRLLSRLICPKCGRIYNMIFLPPKEDELCDDCGVGLVQRDDDKEETVRHRLKVYLEKTQPVIDYYSKKGILKRVDGSQGIDNVVAEVLGILGWSDK

SEQ ID NO: 1081 - DNA, 693 bp, synthetic construct
  misc_feature 1..693: note = Variant of adenylate kinase
  source 1..693: mol_type = other DNA
atgcaccatcatcaccatcacgggggctccggcatgggggcatatctggtgttcttaggtccgccgggcgcgggaaaaggtacccaaggccgtcgcatttcggcaaagactggcatcccgcatattagcacgggcgatatcctgcgtgacatcgtcgctaagcaaaacgatgaagttgcctcgaaaattaaagagatcatggagaaaggtgaactcgttccagatgaactgggtaatgcgctggtaaaacgccgcctgtcggagaaagactgcgaaaaaggctttattttggatggtttcccgcgtaccgtgcgccaagcggaatatctggatagttttcttgaaagccagaatcgccagttgacagccgccgtgctgttcaaagtccccgaagatgaagttatgcagcgtctgctgtctcgcctgatctgtccgaaatgcgggcgtatctacaacatgatttttctgccaccaaaagaagacgagctgtgtgacgattgcggtgtcggcttagtacagcgtgatgatgataaggaagaaacggtccgtcaccgcctgaaagtctaccttgagaagacccagccggtcattgactattatagtaagaaaggtattctcaaacgcgtagatgggtcgcaaggaatcgacaacgttgtggcagaagtcctggggattctgggttggagcgataag

SEQ ID NO: 1082 - protein, 231 aa, synthetic construct
  REGION 1..231: note = Variant of adenylate kinase
MHHHHHHGGSGMGAYLVFLGPPGAGKGTQGRRISAKTGIPHISTGDILRDIVAKQNDEVASKIKEIMEKGELVPDELGNALVKRRLSEKDCEKGFILDGFPRTVRQAEYLDSFLESQNRQLTAAVLFKVPEDEVMQRLLSRLICPKCGRIYNMIFLPPKEDELCDDCGVGLVQRDDDKEETVRHRLKVYLEKTQPVIDYYSKKGILKRVDGSQGIDNVVAEVLGILGWSDK

SEQ ID NO: 1083 - DNA, 693 bp, synthetic construct
  misc_feature 1..693: note = Variant of adenylate kinase
  source 1..693: mol_type = other DNA
atgcaccatcatcaccatcacgggggctccggcatgggggcatatctggtgttcttaggtccgccgggcgcgggaaaaggtacccaaggccgtattatttcggcaaagactggcatcccgcatattagcacgggcgatatcctgcgtgacatcgtcgctaagcaaaacgatgaagttgcctcgaaaattaaagagatcatggagaaaggtgaactcgttccagatgaactgggtaatgcgctggtaaaacgccgcctgtcggagaaagactgcgaaaaaggctttattttggatggtttcccgcgtaccgtgcgccaagcggaatatctggatagttttcttgaaagccagaatcgccagttgacagccgccgtgctgttcaaagtccccgaagatgaagttaaacagcgtctgctgtctcgcctgatctgtccgaaatgcgggcgtatctacaacatgatttttctgccaccaaaagaagacgagctgtgtgacgattgcggtgtcggcttagtacagcgtgatgatgataaggaagaaacggtccgtcaccgcctgaaagtctaccttgagaagacccagccggtcattgactattatagtaagaaaggtattctcaaacgcgtagatgggtcgcaaggaatcgacaacgttgtggcagaagtcctggggattctgggttggagcgataag

SEQ ID NO: 1084 - protein, 231 aa, synthetic construct
  REGION 1..231: note = Variant of adenylate kinase
MHHHHHHGGSGMGAYLVFLGPPGAGKGTQGRIISAKTGIPHISTGDILRDIVAKQNDEVASKIKEIMEKGELVPDELGNALVKRRLSEKDCEKGFILDGFPRTVRQAEYLDSFLESQNRQLTAAVLFKVPEDEVKQRLLSRLICPKCGRIYNMIFLPPKEDELCDDCGVGLVQRDDDKEETVRHRLKVYLEKTQPVIDYYSKKGILKRVDGSQGIDNVVAEVLGILGWSDK

SEQ ID NO: 1085 - DNA, 693 bp, synthetic construct
  misc_feature 1..693: note = Variant of adenylate kinase
  source 1..693: mol_type = other DNA
atgcaccatcatcaccatcacgggggctccggcatgggggcatatctggtgttcttaggtccgccgggcgcgggaaaaggtacccaaggccgtcgcatttcggcaaagactggcatcccgcatattagcacgggcgatatcctgcgtgacatcgtcgctaaacagaacgatgaagttgcctcgaaaattaaagagatcatggagaaaggtgaactcgttccagatgaactgggtaatgcggtagtaaaacgccgcctgtcggagaaagactgcgaaaaaggctttattttggatggtttcccgcgtaccgtgcgccaagcggaatatctggatagttttcttgaaagccagaatcgccagttgacagccgccgtgctgttcaaagtccccgaagatgaagttgttcagcgtctgctgtctcgcctgatctgtccgaaatgcgggcgtatctacaacatgatttttctgccaccaaaagaagacgagctgtgtgacgattgcggtgtcggcttagtacagcgtgatgatgataagccggaaacggtccgtcaccgcctgaaagtctaccatgagaagacccagccggtcattgactattatagtaagaaaggtattctcaaacgcgtagatgggaaccaaggaatcgacaacgttgtggcagaagtcctggggattctgggttggagcgataag

SEQ ID NO: 1086 - protein, 231 aa, synthetic construct
  REGION 1..231: note = Variant of adenylate kinase
MHHHHHHGGSGMGAYLVFLGPPGAGKGTQGRRISAKTGIPHISTGDILRDIVAKQNDEVASKIKEIMEKGELVPDELGNAVVKRRLSEKDCEKGFILDGFPRTVRQAEYLDSFLESQNRQLTAAVLFKVPEDEVVQRLLSRLICPKCGRIYNMIFLPPKEDELCDDCGVGLVQRDDDKPETVRHRLKVYHEKTQPVIDYYSKKGILKRVDGNQGIDNVVAEVLGILGWSDK

SEQ ID NO: 1087 - DNA, 693 bp, synthetic construct
  misc_feature 1..693: note = Variant of adenylate kinase
  source 1..693: mol_type = other DNA
atgcaccatcatcaccatcacgggggctccggcatgggggcatatctggtgttcttaggtccgccgggcgcgggaaaaggtacccaaggccgtcgcatttcggcaaagactggcatcccgcatattagcacgggcgatatcctgcgtgacatcgtcgctaaaagcaacgatgaagttgcctcggaaattaaagagatcatggagaaaggtgaactcgttccagatgaactgggtaatgcggtagtaaaacgccgcctgtcggagaaagactgcgaaaaaggctttattttggatggtttcccgcgtaccgtgcgccaagcggaatatctggatagttttcttgaaagccagaatcgccagttgacagccgccgtgctgttcaaagtccccgaagatgaagttgttcagcgtctgctgtctcgcctgatctgtccgaaatgcgggcgtatctacaacatgatttttctgccaccaaaagaagacgagctgtgtgacgattgcggtgtcggcttagtacagcgtgatgatgataaggaagaaacggtccgtcaccgcctgaaagtctaccttgagaagacccagccggtcattgactattatagtaagaaaggtattctcaaacgcgtagatgggtcgcaaggaatcgacaacgttgtggcagaagtcctggggattctgggttggagcgataag

SEQ ID NO: 1088 - protein, 231 aa, synthetic construct
  REGION 1..231: note = Variant of adenylate kinase
MHHHHHHGGSGMGAYLVFLGPPGAGKGTQGRRISAKTGIPHISTGDILRDIVAKSNDEVASEIKEIMEKGELVPDELGNAVVKRRLSEKDCEKGFILDGFPRTVRQAEYLDSFLESQNRQLTAAVLFKVPEDEVVQRLLSRLICPKCGRIYNMIFLPPKEDELCDDCGVGLVQRDDDKEETVRHRLKVYLEKTQPVIDYYSKKGILKRVDGSQGIDNVVAEVLGILGWSDK

SEQ ID NO: 1089 - DNA, 693 bp, synthetic construct
  misc_feature 1..693: note = Variant of adenylate kinase
  source 1..693: mol_type = other DNA
atgcaccatcatcaccatcacgggggctccggcatgggggcatatctggtgttcttaggtccgccgggcgcgggaaaaggtacccaaggccgtcgcatttcggcaaagactggcatcccgcatattagcacgggcgatatcctgcgtgacatcgtcgctaagcaaaacgatgaagttgcctcgaaaattaaagagatcatggagaaaggtgaactcgttccagatgaactgggtaatgcggtagtaaaacgccgcctgtcggagaaagactgcgaaaaaggctttattttggatggttatccgcggaccgtgcgccaagcggaatatctggatagttttcttgaaagccagaatcgccagttgacagccgccgtgctgttcaaagtccccgaagatgaagttgttcagcgtctgctgtctcgcctgatctgtccgaaatgcgggcgtatctacaacatgatttttctgccaccaaaagaagacgagctgtgtgacgattgcggtgtcggcttagtacagcgtgatgatgataaggaagaaacggtccgtcaccgcctgaaagtctaccttgagaagacccagccggtcattgactattatagtaagaaaggtattctcaaacgcgtagatgggtcgcaaggaatcgacaacgttgtggcagaagtcctggggattctgggttggagcgataag

SEQ ID NO: 1090 - protein, 231 aa, synthetic construct
  REGION 1..231: note = Variant of adenylate kinase
MHHHHHHGGSGMGAYLVFLGPPGAGKGTQGRRISAKTGIPHISTGDILRDIVAKQNDEVASKIKEIMEKGELVPDELGNAVVKRRLSEKDCEKGFILDGYPRTVRQAEYLDSFLESQNRQLTAAVLFKVPEDEVVQRLLSRLICPKCGRIYNMIFLPPKEDELCDDCGVGLVQRDDDKEETVRHRLKVYLEKTQPVIDYYSKKGILKRVDGSQGIDNVVAEVLGILGWSDK

SEQ ID NO: 1091 - DNA, 693 bp, synthetic construct
  misc_feature 1..693: note = Variant of adenylate kinase
  source 1..693: mol_type = other DNA
atgcaccatcatcaccatcacgggggctccggcatgggggcatatctggtgttcttaggtcgtccgggcgcgggaaaaggtacccaaggccgtcgcatttcggcaaagactggcatcccgcatattagcacgggcgatatcctgcgtgacatcgtcgctacacagaacgatgaagttgcctcggaaattaaagagatcatggagaaaggtgaactcgttccagatgaactgggtaatgcggtagtaaaacgccgcctgtcggagaaagactgcgaaaaaggctttattttggatggtttcccgcgtaccgtgcgccaagcggaatatctggatagttttcttgaaagccagaatcgccagttgacagccgccgtgctgttcaaagtccccgaagatgaagttgttcagcgtctgctgtctcgcctgatctgtccgaaatgcgggcgtatctacaacatgatttttctgccaccaaaagaagacgagctgtgtgacgattgcggtgtcggcttagtacagcgtgatgatgataaggaagaaacggtccgtcaccgcctgaaagtctaccatgagaagacccagccggtcattgactattatagtaagaaaggtattctcaaacgcgtagatgggagccaaggaatcgacaacgttgtggcagaagtcctggggattctgggttggagcgataag

SEQ ID NO: 1092 - protein, 231 aa, synthetic construct
  REGION 1..231: note = Variant of adenylate kinase
MHHHHHHGGSGMGAYLVFLGRPGAGKGTQGRRISAKTGIPHISTGDILRDIVATQNDEVASEIKEIMEKGELVPDELGNAVVKRRLSEKDCEKGFILDGFPRTVRQAEYLDSFLESQNRQLTAAVLFKVPEDEVVQRLLSRLICPKCGRIYNMIFLPPKEDELCDDCGVGLVQRDDDKEETVRHRLKVYHEKTQPVIDYYSKKGILKRVDGSQGIDNVVAEVLGILGWSDK

SEQ ID NO: 1093 - DNA, 693 bp, synthetic construct
  misc_feature 1..693: note = Variant of adenylate kinase
  source 1..693: mol_type = other DNA
atgcaccatcatcaccatcacgggggctccggcatgggggcatatctggtgttcttaggtccgccgggcgcgggaaaaggtacccaaggccgtcgcatttcggcaaagactggcatcccgcatattagcacgggcgatatcctgcgtgacatcgtcgctaagcaaaacgatgaagttgcctcgaaaattaaagagatcatggagaaaggtgaactcgttccagatgaactgggtaatgcggtagtaaaacgccgcctgtcggagaaagactgcgaaaaaggctttattttggatggtttcccgcgtaccgtgcgccaagcggaatatctggatagttttcttgaaagccagaatcgccagttgacagccgccgtgctgttcaaagtccccgaagatgaagttgttcagcgtctgctgtctcgcctgatctgtccgaaatgcgggcgtatctacaacatgatttttctgccaccaaaagaagacgagctgtgtgacgattgcggtgtcggcttagtacagcgtgatgatgataaggaagaaacggtccgtcaccgcctgaaagtctaccatgagaagacccagccggtcattgactattatagtaagaaaggtattctcaaacgcgtagatgggaaccaaggaatcgacaacgttgtggcagaagtcctggggattctgggttggagcgataag

SEQ ID NO: 1094 - protein, 231 aa, synthetic construct
  REGION 1..231: note = Variant of adenylate kinase
MHHHHHHGGSGMGAYLVFLGPPGAGKGTQGRRISAKTGIPHISTGDILRDIVAKQNDEVASKIKEIMEKGELVPDELGNAVVKRRLSEKDCEKGFILDGFPRTVRQAEYLDSFLESQNRQLTAAVLFKVPEDEVVQRLLSRLICPKCGRIYNMIFLPPKEDELCDDCGVGLVQRDDDKEETVRHRLKVYHEKTQPVIDYYSKKGILKRVDGNQGIDNVVAEVLGILGWSDK

SEQ ID NO: 1095 - DNA, 693 bp, synthetic construct
  misc_feature 1..693: note = Variant of adenylate kinase
  source 1..693: mol_type = other DNA
atgcaccatcatcaccatcacgggggctccggcatgggggcatatctggtgttcttaggtccgccgggcgcgggaaaaggtacccaaggccgtcgcatttcggcaaagactggcatcccgcatattagcacgggcgatatcctgcgtgacatcgtcgctaagcaaaacgatgaagttgcctcgaaaattaaagagatcatggagaaaggtgaactcgttccagatgaactgggtaatgcggtagtaaaacgccgcctgtcggagaaagactgcgaaaaaggctttattttggatggtttcccgcgtaccgtgcgccaagcggaatatctggatagttttcttgaaagccagaatcgccagttgacagccgccgtgctgtttaacgtccccgaagatgaagttgttcagcgtctgctgtctcgcctgatctgtccgaaatgcgggcgtatctacaacatgatttttctgccaccaaaagaagacgagctgtgtgacgattgcggtgtcggcttagtacagcgtttagatgataaggaagaaacggtccgtcaccgcctgaaagtctaccttgagaagacccagccggtcattgactattatagtaagaaaggtattctcaaacgcgtagatgggtcgcaaggaatcgacaacgttgtggcagaagtcctggggattctgggttggagcgataag

SEQ ID NO: 1096 - protein, 231 aa, synthetic construct
  REGION 1..231: note = Variant of adenylate kinase
MHHHHHHGGSGMGAYLVFLGPPGAGKGTQGRRISAKTGIPHISTGDILRDIVAKQNDEVASKIKEIMEKGELVPDELGNAVVKRRLSEKDCEKGFILDGFPRTVRQAEYLDSFLESQNRQLTAAVLFNVPEDEVVQRLLSRLICPKCGRIYNMIFLPPKEDELCDDCGVGLVQRLDDKEETVRHRLKVYLEKTQPVIDYYSKKGILKRVDGSQGIDNVVAEVLGILGWSDK

SEQ ID NO: 1097 - DNA, 693 bp, synthetic construct
  misc_feature 1..693: note = Variant of adenylate kinase
  source 1..693: mol_type = other DNA
atgcaccatcatcaccatcacgggggctccggcatgggggcatatctggtgttcttaggtcgtccgggcgcgggaaaaggtacccaaggccgtcgcatttcggcaaagactggcatcccgcatattagcacgggcgatatcctgcgtgacatcgtcgctaagcaaaacgatgaagttgcctcgagcattaaagagatcatggagaaaggtgaactcgttccagatgaactgggcaatgcggtagtaaaacgccgcctgtcggagaaagactgcgaaaaaggctttattttggatggtttcccgcgtaccgtgcgccaagcggaatatctggatagttttcttgaaagccagaatcgccagttgacagccgccgtgctgttcaaagtccccgaagatgaagttgttcagcgtctgctgtctcgcctgatctgtccgaaatgcgggcgtatctacaacatgatttttctgccaccaaaagaagacgagctgtgtgacgattgcggtgtcggcttagtacagcgtgatgatgataaggaagaaacggtccgtcaccgcctgaaagtctaccatgagaagacccagccggtcattgactattatagtaagaaaggtattctcaaacgcgtagatgggagccaaggaatcgacaacgttgtggcagaagtcctggggattctgggttggagcgataag

SEQ ID NO: 1098 - protein, 231 aa, synthetic construct
  REGION 1..231: note = Variant of adenylate kinase
MHHHHHHGGSGMGAYLVFLGRPGAGKGTQGRRISAKTGIPHISTGDILRDIVAKQNDEVASSIKEIMEKGELVPDELGNAVVKRRLSEKDCEKGFILDGFPRTVRQAEYLDSFLESQNRQLTAAVLFKVPEDEVVQRLLSRLICPKCGRIYNMIFLPPKEDELCDDCGVGLVQRDDDKEETVRHRLKVYHEKTQPVIDYYSKKGILKRVDGSQGIDNVVAEVLGILGWSDK

SEQ ID NO: 1099 - DNA, 693 bp, synthetic construct
  misc_feature 1..693: note = Variant of adenylate kinase
  source 1..693: mol_type = other DNA
atgcaccatcatcaccatcacgggggctccggcatgggggcatatctggtgttcttaggtcctccgggcgcgggaaaaggtacccaaggccgtcgcatttcggcaaagactggcatcccgcatattagcacgggcgatatcctgcgtgacatcgtcgctacacagaacgatgaagttgcctcgaaaattaaagagatcatggagaaaggtgaactcgttccagatgaactgggcaatgcggtagtaaaacgccgcctgtcggagaaagactgcgaaaaaggctttattttggatggtttcccgcgtaccgtgcgccaagcggaatatctggatagttttcttgaaagccagaatcgccagttgacagccgccgtgctgttcaaagtccccgaagatgaagttgttcagcgtctgctgtctcgcctgatctgtccgaaatgcgggcgtatctacaacatgatttttctgccaccaaaagaagacgagctgtgtgacgattgcggtgtcggcttagtacagcgtgatgatgataagccggaaacggtccgtcaccgcctgaaagtctaccatgagaagacccagccggtcattgactattatagtaagaaaggtattctcaaacgcgtagatgggtcgcaaggaatcgacaacgttgtggcagaagtcctggggattctgggttggagcgataag

SEQ ID NO: 1100 - protein, 231 aa, synthetic construct
  REGION 1..231: note = Variant of adenylate kinase
MHHHHHHGGSGMGAYLVFLGPPGAGKGTQGRRISAKTGIPHISTGDILRDIVATQNDEVASKIKEIMEKGELVPDELGNAVVKRRLSEKDCEKGFILDGFPRTVRQAEYLDSFLESQNRQLTAAVLFKVPEDEVVQRLLSRLICPKCGRIYNMIFLPPKEDELCDDCGVGLVQRDDDKPETVRHRLKVYHEKTQPVIDYYSKKGILKRVDGSQGIDNVVAEVLGILGWSDK

SEQ ID NO: 1101 - DNA, 693 bp, synthetic construct
  misc_feature 1..693: note = Variant of adenylate kinase
  source 1..693: mol_type = other DNA
atgcaccatcatcaccatcacgggggctccggcatgggggcatatctggtgttcttaggtccgccgggcgcgggaaaaggtacccaaggccgtcgcatttcggcaaagactggcatcccgcatattagcacgggcgatatcctgcgtgacatcgtcgctacacagaacgatgaagttgcctcgaaaattaaagagatcatggagaaaggtgaactcgttccagatgaactgggtaatgcggtagtaaaacgccgcctgtcggagaaagactgcgaaaaaggctttattttggatggtttcccgcgtaccgtgcgccaagcggaatatctggatagttttcttgaaagccagaatcgccagttgacagccgccgtgctgttcaaagtccccgaagatgaagttgttcagcgtctgctgtctcgcctgatctgtccgaaatgcgggcgtatctacaacatgatttttctgccaccaaaagaagacgagctgtgtgacgattgcggtgtcggcttagtacagcgtgatgatgataaggaagaaacggtccgtcaccgcctgaaagtctaccgtgagaagacccagccggtcattgactattatagtaagaaaggtattctcaaacgcgtagatgggtcgcaaggaatcgacaacgttgtggcagaagtcctggggattctgggttggagcgataag

SEQ ID NO: 1102 - protein, 231 aa, synthetic construct
  REGION 1..231: note = Variant of adenylate kinase
MHHHHHHGGSGMGAYLVFLGPPGAGKGTQGRRISAKTGIPHISTGDILRDIVATQNDEVASKIKEIMEKGELVPDELGNAVVKRRLSEKDCEKGFILDGFPRTVRQAEYLDSFLESQNRQLTAAVLFKVPEDEVVQRLLSRLICPKCGRIYNMIFLPPKEDELCDDCGVGLVQRDDDKEETVRHRLKVYREKTQPVIDYYSKKGILKRVDGSQGIDNVVAEVLGILGWSDK

SEQ ID NO: 1103 - DNA, 693 bp, synthetic construct
  misc_feature 1..693: note = Variant of adenylate kinase
  source 1..693: mol_type = other DNA
atgcaccatcatcaccatcacgggggctccggcatgggggcatatctggtgttcttaggtcgtccgggcgcgggaaaaggtacccaaggccgtcgcatttcggcaaagactggcatcccgcatattagcacgggcgatatcctgcgtgacatcgtcgctaaaagcaacgatgaagttgcctcgaaaattaaagagatcatggagaaaggtgaactcgttccagatgaactgggtaatgcggtagtaaaacgccgcctgtcggagaaagactgcgaaaaaggctttattttggatggtttcccgcgtaccgtgcgccaagcggaatatctggatagttttcttgaaagccagaatcgccagttgacagccgccgtgctgttcaaagtccccgaagatgaagttgttcagcgtctgctgtctcgcctgatctgtccgaaatgcgggcgtatctacaacatgatttttctgccaccaaaagaagacgagctgtgtgacgattgcggtgtcggcttagtacagcgtgatgatgataaggaagaaacggtccgtcaccgcctgaaagtctaccatgagaagacccagccggtcattgactattatagtaagaaaggtattctcaaacgcgtagatgggtcgcaaggaatcgacaacgttgtggcagaagtcctggggattctgggttggagcgataag

SEQ ID NO: 1104 - protein, 231 aa, synthetic construct
  REGION 1..231: note = Variant of adenylate kinase
MHHHHHHGGSGMGAYLVFLGRPGAGKGTQGRRISAKTGIPHISTGDILRDIVAKSNDEVASKIKEIMEKGELVPDELGNAVVKRRLSEKDCEKGFILDGFPRTVRQAEYLDSFLESQNRQLTAAVLFKVPEDEVVQRLLSRLICPKCGRIYNMIFLPPKEDELCDDCGVGLVQRDDDKEETVRHRLKVYHEKTQPVIDYYSKKGILKRVDGSQGIDNVVAEVLGILGWSDK

SEQ ID NO: 1105 - DNA, 693 bp, synthetic construct
  misc_feature 1..693: note = Variant of adenylate kinase
  source 1..693: mol_type = other DNA
atgcaccatcatcaccatcacgggggctccggcatgggggcatatctggtgttcttaggtcgtccgggcgcgggaaaaggtacccaaggccgtcgcatttcggcaaagactggcatcccgcatattagcacgggcgatatcctgcgtgacatcgtcgctacacagaacgatgaagttgcctcggaaattaaagagatcatggagaaaggtgaactcgttccagatgaactgggtaatgcggtagtaaaacgccgcctgtcggagaaagactgcgaaaaaggctttattttggatggtttcccgcgtaccgtgcgccaagcggaatatctggatagttttcttgaaagccagaatcgccagttgacagccgccgtgctgttcaaagtccccgaagatgaagttgttcagcgtctgctgtctcgcctgatctgtccgaaatgcgggcgtatctacaacatgatttttctgccaccaaaagaagacgagctgtgtgacgattgcggtgtcggcttagtacagcgtgatgatgataaggaagaaacggtccgtcaccgcctgaaagtctaccttgagaagacccagccggtcattgactattatagtaagaaaggtattctcaaacgcgtagatgggagccaaggaatcgacaacgttgtggcagaagtcctggggattctgggttggagcgataag

SEQ ID NO: 1106 - protein, 231 aa, synthetic construct
  REGION 1..231: note = Variant of adenylate kinase
MHHHHHHGGSGMGAYLVFLGRPGAGKGTQGRRISAKTGIPHISTGDILRDIVATQNDEVASEIKEIMEKGELVPDELGNAVVKRRLSEKDCEKGFILDGFPRTVRQAEYLDSFLESQNRQLTAAVLFKVPEDEVVQRLLSRLICPKCGRIYNMIFLPPKEDELCDDCGVGLVQRDDDKEETVRHRLKVYLEKTQPVIDYYSKKGILKRVDGSQGIDNVVAEVLGILGWSDK

SEQ ID NO: 1107 - DNA, 693 bp, synthetic construct
  misc_feature 1..693: note = Variant of adenylate kinase
  source 1..693: mol_type = other DNA
atgcaccatcatcaccatcacgggggctccggcatgggggcatatctggtgttcttaggtcgtccgggcgcgggaaaaggtacccaaggccgtcgcatttcggcaaagactggcatcccgcatattagcacgggcgatatcctgcgtgacatcgtcgctaaacagaacgatgaagttgcctcgaaaattaaagagatcatggagaaaggtgaactcgttccagatgaactgggcaatgcggtagtaaaagcgcgcctgtcggagaaagactgcgaaaaaggctttattttggatggtttcccgcgtaccgtgcgccaagcggaatatctggatagttttcttgaaagccagaatcgccagttgacagccgccgtgctgttcaaagtccccgaagatgaagttgttcagcgtctgctgtctcgcctgatctgtccgaaatgcgggcgtatctacaacatgatttttctgccaccaaaagaagacgagctgtgtgacgattgcggtgtcggcttagtacagcgtgatgatgataaggaagaaacggtccgtcaccgcctgaaagtctaccttgagaagacccagccggtcattgactattatagtaagaaaggtattctcaaacgcgtagatgggtcgcaaggaatcgacaacgttgtggcagaagtcctggggattctgggttggagcgataag

SEQ ID NO: 1108 - protein, 231 aa, synthetic construct
  REGION 1..231: note = Variant of adenylate kinase
MHHHHHHGGSGMGAYLVFLGRPGAGKGTQGRRISAKTGIPHISTGDILRDIVAKQNDEVASKIKEIMEKGELVPDELGNAVVKARLSEKDCEKGFILDGFPRTVRQAEYLDSFLESQNRQLTAAVLFKVPEDEVVQRLLSRLICPKCGRIYNMIFLPPKEDELCDDCGVGLVQRDDDKEETVRHRLKVYLEKTQPVIDYYSKKGILKRVDGSQGIDNVVAEVLGILGWSDK

SEQ ID NO: 1109 - DNA, 693 bp, synthetic construct
  misc_feature 1..693: note = Variant of adenylate kinase
  source 1..693: mol_type = other DNA
atgcaccatcatcaccatcacgggggctccggcatgggggcatatctggtgttcttaggtcgtccgggcgcgggaaaaggtacccaaggccgtcgcatttcggcaaagactggcatcccgcatattagcacgggcgatatcctgcgtgacatcgtcgctaaaagcaacgatgaagttgcctcgaaaattaaagagatcatggagaaaggtgaactcgttccagatgaactgggtaatgcggtagtaaaacgccgcctgtcggagaaagactgcgaaaaaggctttattttggatggtttcccgcgtaccgtgcgccaagcggaatatctggatagttttcttgaaagccagaatcgccagttgacagccgccgtgctgttcaaagtccccgaagatgaagttgttcagcgtctgctgtctcgcctgatctgtccgaaatgcgggcgtatctacaacatgatttttctgccaccaaaagaagacgagctgtgtgacgattgcggtgtcggcttagtacagcgtgatgatgataaggaagaaacggtccgtcaccgcctgaaagtctaccttgagaagacccagccggtcattgactattatagtaagaaaggtattctcaaacgcgtagatgggtcgcaaggaatcgacaacgttgtggcagaagtcctggggattctgggttggagcgataag

SEQ ID NO: 1110 - protein, 231 aa, synthetic construct
  REGION 1..231: note = Variant of adenylate kinase
MHHHHHHGGSGMGAYLVFLGRPGAGKGTQGRRISAKTGIPHISTGDILRDIVAKSNDEVASKIKEIMEKGELVPDELGNAVVKRRLSEKDCEKGFILDGFPRTVRQAEYLDSFLESQNRQLTAAVLFKVPEDEVVQRLLSRLICPKCGRIYNMIFLPPKEDELCDDCGVGLVQRDDDKEETVRHRLKVYLEKTQPVIDYYSKKGILKRVDGSQGIDNVVAEVLGILGWSDK

SEQ ID NO: 1111 - DNA, 693 bp, synthetic construct
  misc_feature 1..693: note = Variant of adenylate kinase
  source 1..693: mol_type = other DNA
atgcaccatcatcaccatcacgggggctccggcatgggggcatatctggtgttcttaggtcgtccgggcgcgggaaaaggtacccaaggccgtcgcatttcggcaaagactggcatcccgcatattagcacgggcgatatcctgcgtgacatcgtcgctaagcaaaacgatgaagttgcctcgagcattaaagagatcatggagaaaggtgaactcgttccagatgaactgggtaatgcggtagtaaaacgccgcctgtcggagaaagactgcgaaaaaggctttattttggatggtttcccgcgtaccgtgcgccaagcggaatatctggatagttttcttgaaagccagaatcgccagttgacagccgccgtgctgttcaaagtccccgaagatgaagttgttcagcgtctgctgtctcgcctgatctgtccgaaatgcgggcgtatctacaacatgatttttctgccaccaaaagaagacgagctgtgtgacgattgcggtgtcggcttagtacagcgtgatgatgataaggaagaaacggtccgtcaccgcctgaaagtctaccttgagaagacccagccggtcattgactattatagtaagaaaggtattctcaaacgcgtagatgggtcgcaaggaatcgacaacgttgtggcagaagtcctggggattctgggttggagcgataag

SEQ ID NO: 1112 - protein, 231 aa, synthetic construct
  REGION 1..231: note = Variant of adenylate kinase
MHHHHHHGGSGMGAYLVFLGRPGAGKGTQGRRISAKTGIPHISTGDILRDIVAKQNDEVASSIKEIMEKGELVPDELGNAVVKRRLSEKDCEKGFILDGFPRTVRQAEYLDSFLESQNRQLTAAVLFKVPEDEVVQRLLSRLICPKCGRIYNMIFLPPKEDELCDDCGVGLVQRDDDKEETVRHRLKVYLEKTQPVIDYYSKKGILKRVDGSQGIDNVVAEVLGILGWSDK

SEQ ID NO: 1113 - DNA, 693 bp, synthetic construct
  misc_feature 1..693: note = Variant of adenylate kinase
  source 1..693: mol_type = other DNA
atgcaccatcatcaccatcacgggggctccggcatgggggcatatctggtgttcttaggtcgtccgggcgcgggaaaaggtacccaaggccgtcgcatttcggcaaagactggcatcccgcatattagcacgggcgatatcctgcgtgacatcgtcgctaaacagaacgatgaagttgcctcgaaaattaaagagatcatggagaaaggtgaactcgttccagatgaactgggcaatgcggtagtaaaacgccgcctgtcggagaaagactgcgaaaaaggctttattttggatggtttcccgcgtaccgtgcgccaagcggaatatctggatagttttcttgaaagccagaatcgccagttgacagccgccgtgctgttcaaagtccccgaagatgaagttgttcagcgtctgctgtctcgcctgatctgtccgaaatgcgggcgtatctacaacatgatttttctgccaccaaaagaagacgagctgtgtgacgattgcggtgtcggcttagtacagcgtgatgatgataagccggaaacggtccgtcaccgcctgaaagtctaccttgagaagacccagccggtcattgactattatagtaagaaaggtattctcaaacgcgtagatgggagccaaggaatcgacaacgttgtggcagaagtcctggggattctgggttggagcgataag

SEQ ID NO: 1114 - protein, 231 aa, synthetic construct
  REGION 1..231: note = Variant of adenylate kinase
MHHHHHHGGSGMGAYLVFLGRPGAGKGTQGRRISAKTGIPHISTGDILRDIVAKQNDEVASKIKEIMEKGELVPDELGNAVVKRRLSEKDCEKGFILDGFPRTVRQAEYLDSFLESQNRQLTAAVLFKVPEDEVVQRLLSRLICPKCGRIYNMIFLPPKEDELCDDCGVGLVQRDDDKPETVRHRLKVYLEKTQPVIDYYSKKGILKRVDGSQGIDNVVAEVLGILGWSDK

SEQ ID NO: 1115 - DNA, 693 bp, synthetic construct
  misc_feature 1..693: note = Variant of adenylate kinase
  source 1..693: mol_type = other DNA
atgcaccatcatcaccatcacgggggctccggcatgggggcatatctggtgttcttaggtccgccgggcgcgggaaaaggtacccaaggccgtcgcatttcggcaaagactggcatcccgcatattagcacgggcgatatcctgcgtgacatcgtcgctaagcaaaacgatgaagttgcctcgaaaattaaagagatcatggagaaaggtgaactcgttccagatgaactgggtaatgcggtagtaaaacgccgcctgtcggagaaagactgcgaaaaaggctttattttggatggtttcccgcgtaccgtgcgccaagcggaatatctggatagttttcttgaaagccagaatcgccagttgacagccgccgtgctgttcaaagtccccgaagatgaagttgttcagcgtctgctgtctcgcctgatctgtccgaaatgcgggcgtatctacaacatgatttttctgccaccaaaagaagacgagctgtgtgacgattgcggtgtcggcttagtacagcgtctggatgataaggaagaaacggtccgtcaccgcctgaaagtctaccttgagaagacccagccggtcattgactattatagtaagaaaggtattctcaaacgcgtagatgggtcgcaaggaatcgacaacgttgtggcagaagtcctggggattctgggttggagcgataag

SEQ ID NO: 1116 - protein, 231 aa, synthetic construct
  REGION 1..231: note = Variant of adenylate kinase
MHHHHHHGGSGMGAYLVFLGPPGAGKGTQGRRISAKTGIPHISTGDILRDIVAKQNDEVASKIKEIMEKGELVPDELGNAVVKRRLSEKDCEKGFILDGFPRTVRQAEYLDSFLESQNRQLTAAVLFKVPEDEVVQRLLSRLICPKCGRIYNMIFLPPKEDELCDDCGVGLVQRLDDKEETVRHRLKVYLEKTQPVIDYYSKKGILKRVDGSQGIDNVVAEVLGILGWSDK

SEQ ID NO: 1117 - DNA, 693 bp, synthetic construct
  misc_feature 1..693: note = Variant of adenylate kinase
  source 1..693: mol_type = other DNA
atgcaccatcatcaccatcacgggggctccggcatgggggcatatctggtgttcttaggtccgccgggcgcgggaaaaggtacccaaggccgtcgcatttcggcaaagactggcatcccgcatattagcacgggcgatatcctgcgtgacatcgtcgctaaaagcaacgatgaagttgcctcggaaattaaagagatcatggagaaaggtgaactcgttccagatgaactgggcaatgcggtagtaaaacgccgcctgtcggagaaagactgcgaaaaaggctttattttggatggtttcccgcgtaccgtgcgccaagcggaatatctggatagttttcttgaaagccagaatcgccagttgacagccgccgtgctgttcaaagtccccgaagatgaagttgttcagcgtctgctgtctcgcctgatctgtccgaaatgcgggcgtatctacaacatgatttttctgccaccaaaagaagacgagctgtgtgacgattgcggtgtcggcttagtacagcgtgatgatgataaggaagaaacggtccgtcaccgcctgaaagtctaccatgagaagacccagccggtcattgactattatagtaagaaaggtattctcaaacgcgtagatgggaaccaaggaatcgacaacgttgtggcagaagtcctggggattctgggttggagcgataag

SEQ ID NO: 1118 - protein, 231 aa, synthetic construct
  REGION 1..231: note = Variant of adenylate kinase
MHHHHHHGGSGMGAYLVFLGPPGAGKGTQGRRISAKTGIPHISTGDILRDIVAKSNDEVASEIKEIMEKGELVPDELGNAVVKRRLSEKDCEKGFILDGFPRTVRQAEYLDSFLESQNRQLTAAVLFKVPEDEVVQRLLSRLICPKCGRIYNMIFLPPKEDELCDDCGVGLVQRDDDKEETVRHRLKVYHEKTQPVIDYYSKKGILKRVDGNQGIDNVVAEVLGILGWSDK

SEQ ID NO: 1119 - DNA, 693 bp, synthetic construct
  misc_feature 1..693: note = Variant of adenylate kinase
  source 1..693: mol_type = other DNA
atgcaccatcatcaccatcacgggggctccggcatgggggcatatctggtgttcttaggtcctccgggtgcgggaaaaggtacccaaggccgtcgcatttcggcaaagactggcatcccgcatattagcacgggcgatatcctgcgtgacatcgtcgctacacagaacgatgaagttgcctcggaaattaaagagatcatggagaaaggtgaactcgttccagatgaactgggtaatgcggtagtaaaagcgcgcctgtcggagaaagactgcgaaaaaggctttattttggatggtttcccgcgtaccgtgcgccaagcggaatatctggatagttttcttgaaagccagaatcgccagttgacagccgccgtgctgttcaaagtccccgaagatgaagttgttcagcgtctgctgtctcgcctgatctgtccgaaatgcgggcgtatctacaacatgatttttctgccaccaaaagaagacgagctgtgtgacgattgcggtgtcggcttagtacagcgtgatgatgataaggaagaaacggtccgtcaccgcctgaaagtctaccttgagaagacccagccggtcattgactattatagtaagaaaggtattctcaaacgcgtagatgggtcgcaaggaatcgacaacgttgtggcagaagtcctggggattctgggttggagcgataag

SEQ ID NO: 1120 - protein, 231 aa, synthetic construct
  REGION 1..231: note = Variant of adenylate kinase
MHHHHHHGGSGMGAYLVFLGPPGAGKGTQGRRISAKTGIPHISTGDILRDIVATQNDEVASEIKEIMEKGELVPDELGNAVVKARLSEKDCEKGFILDGFPRTVRQAEYLDSFLESQNRQLTAAVLFKVPEDEVVQRLLSRLICPKCGRIYNMIFLPPKEDELCDDCGVGLVQRDDDKEETVRHRLKVYLEKTQPVIDYYSKKGILKRVDGSQGIDNVVAEVLGILGWSDK

SEQ ID NO: 1121 - DNA, 693 bp, synthetic construct
  misc_feature 1..693: note = Variant of adenylate kinase
  source 1..693: mol_type = other DNA
atgcaccatcatcaccatcacgggggctccggcatgggggcatatctggtgttcttaggtccgccgggcgcgggaaaaggtacccaaggccgtcgcatttcggcaaagactggcatcccgcatattagcacgggcgatatcctgcgtgacatcgtcgctaagcaaaacgatgaagttgcctcgaaaattaaagagatcatggagaaaggtgaactcgttccagatgaactgggtaatgcggtggtaaaacgccgcctgtcggagaaagactgcgaaaaaggctttattttggatggtttcccgcgtaccgtgcgccaagcggaatatctggatagttttcttgaaagccagaatcgccagttgacagccgccgtgctgattaacgtccccgaagatgaagttgttcagcgtctgctgtctcgcctgatctgtccgaaatgcgggcgtatctacaacatgatttttctgccaccaaaagaagacgagctgtgtgacgattgcggtgtcggcttagtacagcgtttagatgataaggaagaaacggtccgtcaccgcctgaaagtctaccttgagaagacccagccggtcattgactattatagtaagaaaggtattctcaaacgcgtagatgggtcgcaaggaatcgacaacgttgtggcagaagtcctgggggcgctgggttggagcgataag

SEQ ID NO: 1122 - protein, 231 aa, synthetic construct
  REGION 1..231: note = Variant of adenylate kinase
MHHHHHHGGSGMGAYLVFLGPPGAGKGTQGRRISAKTGIPHISTGDILRDIVAKQNDEVASKIKEIMEKGELVPDELGNAVVKRRLSEKDCEKGFILDGFPRTVRQAEYLDSFLESQNRQLTAAVLINVPEDEVVQRLLSRLICPKCGRIYNMIFLPPKEDELCDDCGVGLVQRLDDKEETVRHRLKVYLEKTQPVIDYYSKKGILKRVDGSQGIDNVVAEVLGALGWSDK

SEQ ID NO: 1123 - DNA, 693 bp, synthetic construct
  misc_feature 1..693: note = Variant of adenylate kinase
  source 1..693: mol_type = other DNA
atgcaccatcatcaccatcacgggggctccggcatgggggcatatctggtgttcttaggtcctccgggcgcgggaaaaggtacccaaggccgtcgcatttcggcaaagactggcatcccgcatattagcacgggcgatatcctgcgtgacatcgtcgctacacagaacgatgaagttgcctcggaaattaaagagatcatggagaaaggtgaactcgttccagatgaactgggtaatgcggtagtaaaacgccgcctgtcggagaaagactgcgaaaaaggctttattttggatggtttcccgcgtaccgtgcgccaagcggaatatctggatagttttcttgaaagccagaatcgccagttgacagccgccgtgctgttcaaagtccccgaagatgaagttgttcagcgtctgctgtctcgcctgatctgtccgaaatgcgggcgtatctacaacatgatttttctgccaccaaaagaagacgagctgtgtgacgattgcggtgtcggcttagtacagcgtgatgatgataaggaagaaacggtccgtcaccgcctgaaagtctaccttgagaagacccagccggtcattgactattatagtaagaaaggtattctcaaacgcgtagatgggtcgcaaggaatcgacaacgttgtggcagaagtcctggggattctgggttggagcgataag

SEQ ID NO: 1124 - protein, 231 aa, synthetic construct
  REGION 1..231: note = Variant of adenylate kinase
MHHHHHHGGSGMGAYLVFLGPPGAGKGTQGRRISAKTGIPHISTGDILRDIVATQNDEVASEIKEIMEKGELVPDELGNAVVKRRLSEKDCEKGFILDGFPRTVRQAEYLDSFLESQNRQLTAAVLFKVPEDEVVQRLLSRLICPKCGRIYNMIFLPPKEDELCDDCGVGLVQRDDDKEETVRHRLKVYLEKTQPVIDYYSKKGILKRVDGSQGIDNVVAEVLGILGWSDK

SEQ ID NO: 1125 - DNA, 693 bp, synthetic construct
  misc_feature 1..693: note = Variant of adenylate kinase
  source 1..693: mol_type = other DNA
atgcaccatcatcaccatcacgggggctccggcatgggggcatatctggtgttcttaggtccgccgggcgcgggaaaaggtacccaaggccgtcgcatttcggcaaagactggcatcccgcatattagcacgggcgatatcctgcgtgacatcgtcgctaagcaaaacgatgaagttgcctcgaaaattaaagagatcatggagaaaggtgaactcgttccagatgaactgggtaatgcggtagtaaaacgccgcctgtcggagaaagactgcgaaaaaggctttattttggatggttatccgcgtacctttcgccaagcggaatatctggatagttttcttgaaagccagaatcgccagttgacagccgccgtgctgttcaaagtccccgaagatgaagttgttcagcgtctgctgtctcgcctgatctgtccgaaatgcgggcgtatctacaacatgatttttctgccaccaaaagaagacgagctgtgtgacgattgcggtgtcggcttagtacagcgtgatgatgataaggaagaaacggtccgtcaccgcctgaaagtctaccttgagaagacccagccggtcattgactattatagtaagaaaggtattctcaaacgcgtagatgggtcgcaaggaatcgacaacgttgtggcagaagtcctggggattctgggttggagcgataag

SEQ ID NO: 1126 - protein, 231 aa, synthetic construct
  REGION 1..231: note = Variant of adenylate kinase
MHHHHHHGGSGMGAYLVFLGPPGAGKGTQGRRISAKTGIPHISTGDILRDIVAKQNDEVASKIKEIMEKGELVPDELGNAVVKRRLSEKDCEKGFILDGYPRTFRQAEYLDSFLESQNRQLTAAVLFKVPEDEVVQRLLSRLICPKCGRIYNMIFLPPKEDELCDDCGVGLVQRDDDKEETVRHRLKVYLEKTQPVIDYYSKKGILKRVDGSQGIDNVVAEVLGILGWSDK

SEQ ID NO: 1127 - DNA, 693 bp, synthetic construct
  misc_feature 1..693: note = Variant of adenylate kinase
  source 1..693: mol_type = other DNA
atgcaccatcatcaccatcacgggggctccggcatgggggcatatctggtgttcttaggtcctccgggcgcgggaaaaggtacccaaggccgtcgcatttcggcaaagactggcatcccgcatattagcacgggcgatatcctgcgtgacatcgtcgctaaaagcaacgatgaagttgcctcggaaattaaagagatcatggagaaaggtgaactcgttccagatgaactgggcaatgcggtagtaaaacgccgcctgtcggagaaagactgcgaaaaaggctttattttggatggtttcccgcgtaccgtgcgccaagcggaatatctggatagttttcttgaaagccagaatcgccagttgacagccgccgtgctgttcaaagtccccgaagatgaagttgttcagcgtctgctgtctcgcctgatctgtccgaaatgcgggcgtatctacaacatgatttttctgccaccaaaagaagacgagctgtgtgacgattgcggtgtcggcttagtacagcgtgatgatgataaggaagaaacggtccgtcaccgcctgaaagtctaccgtgagaagacccagccggtcattgactattatagtaagaaaggtattctcaaacgcgtagatgggaaccaaggaatcgacaacgttgtggcagaagtcctggggattctgggttggagcgataag

SEQ ID NO: 1128 - protein, 231 aa, synthetic construct
  REGION 1..231: note = Variant of adenylate kinase
MHHHHHHGGSGMGAYLVFLGPPGAGKGTQGRRISAKTGIPHISTGDILRDIVAKSNDEVASEIKEIMEKGELVPDELGNAVVKRRLSEKDCEKGFILDGFPRTVRQAEYLDSFLESQNRQLTAAVLFKVPEDEVVQRLLSRLICPKCGRIYNMIFLPPKEDELCDDCGVGLVQRDDDKEETVRHRLKVYREKTQPVIDYYSKKGILKRVDGNQGIDNVVAEVLGILGWSDK

SEQ ID NO: 1129 - DNA, 693 bp, synthetic construct
  misc_feature 1..693: note = Variant of adenylate kinase
  source 1..693: mol_type = other DNA
atgcaccatcatcaccatcacgggggctccggcatgggggcatatctggtgttcttaggtcctccgggcgcgggaaaaggtacccaaggccgtcgcatttcggcaaagactggcatcccgcatattagcacgggcgatatcctgcgtgacatcgtcgctacaagcaacgatgaagttgcctcgaaaattaaagagatcatggagaaaggtgaactcgttccagatgaactgggcaatgcggtagtaaaacgccgcctgtcggagaaagactgcgaaaaaggctttattttggatggtttcccgcgtaccgtgcgccaagcggaatatctggatagttttcttgaaagccagaatcgccagttgacagccgccgtgctgttcaaagtccccgaagatgaagttgttcagcgtctgctgtctcgcctgatctgtccgaaatgcgggcgtatctacaacatgatttttctgccaccaaaagaagacgagctgtgtgacgattgcggtgtcggcttagtacagcgtgatgatgataaggaagaaacggtccgtcaccgcctgaaagtctaccttgagaagacccagccggtcattgactattatagtaagaaaggtattctcaaacgcgtagatgggtcgcaaggaatcgacaacgttgtggcagaagtcctggggattctgggttggagcgataag

SEQ ID NO: 1130 - protein, 231 aa, synthetic construct
  REGION 1..231: note = Variant of adenylate kinase
MHHHHHHGGSGMGAYLVFLGPPGAGKGTQGRRISAKTGIPHISTGDILRDIVATSNDEVASKIKEIMEKGELVPDELGNAVVKRRLSEKDCEKGFILDGFPRTVRQAEYLDSFLESQNRQLTAAVLFKVPEDEVVQRLLSRLICPKCGRIYNMIFLPPKEDELCDDCGVGLVQRDDDKEETVRHRLKVYLEKTQPVIDYYSKKGILKRVDGSQGIDNVVAEVLGILGWSDK

SEQ ID NO: 1131 - DNA, 693 bp, synthetic construct
  misc_feature 1..693: note = Variant of adenylate kinase
  source 1..693: mol_type = other DNA
atgcaccatcatcaccatcacgggggctccggcatgggggcatatctggtgttcttaggtcgtccgggcgcgggaaaaggtacccaaggccgtcgcatttcggcaaagactggcatcccgcatattagcacgggcgatatcctgcgtgacatcgtcgctaaaagcaacgatgaagttgcctcgaaaattaaagagatcatggagaaaggtgaactcgttccagatgaactgggcaatgcggtagtaaaacgccgcctgtcggagaaagactgcgaaaaaggctttattttggatggtttcccgcgtaccgtgcgccaagcggaatatctggatagttttcttgaaagccagaatcgccagttgacagccgccgtgctgttcaaagtccccgaagatgaagttgttcagcgtctgctgtctcgcctgatctgtccgaaatgcgggcgtatctacaacatgatttttctgccaccaaaagaagacgagctgtgtgacgattgcggtgtcggcttagtacagcgtgatgatgataaggaagaaacggtccgtcaccgcctgaaagtctaccttgagaagacccagccggtcattgactattatagtaagaaaggtattctcaaacgcgtagatgggaaccaaggaatcgacaacgttgtggcagaagtcctggggattctgggttggagcgataag

SEQ ID NO: 1132 - protein, 231 aa, synthetic construct
  REGION 1..231: note = Variant of adenylate kinase
MHHHHHHGGSGMGAYLVFLGRPGAGKGTQGRRISAKTGIPHISTGDILRDIVAKSNDEVASKIKEIMEKGELVPDELGNAVVKRRLSEKDCEKGFILDGFPRTVRQAEYLDSFLESQNRQLTAAVLFKVPEDEVVQRLLSRLICPKCGRIYNMIFLPPKEDELCDDCGVGLVQRDDDKEETVRHRLKVYLEKTQPVIDYYSKKGILKRVDGNQGIDNVVAEVLGILGWSDK

SEQ ID NO: 1133 - DNA, 693 bp, synthetic construct
  misc_feature 1..693: note = Variant of adenylate kinase
  source 1..693: mol_type = other DNA
atgcaccatcatcaccatcacgggggctccggcatgggggcatatctggtgttcttaggtccgccgggcgcgggaaaaggtacccaaggccgtcgcatttcggcaaagactggcatcccgcatattagcacgggcgatatcctgcgtgacatcgtcgctaagcaaaacgatgaagttgcctcgagtattaaagagatcatggagaaaggtgaactcgttccagatgaactgggtaatgcggtagtaaaacgccgcctgtcggagaaagactgcgaaaaaggctttattttggatggtttcccgcgtaccgtgcgccaagcggaatatctggatagttttcttgaaagccagaatcgccagttgacagccgccgtgctgttcaaagtccccgaagatgaagttgttcagcgtctgctgtctcgcctgatctgtccgaaatgcgggcgtatctacaacatgatttttctgccaccaaaagaagacgagctgtgtgacgattgcggtgtcggcttagtacagcgtgatgatgataaggaagaaacggtccgtcaccgcctgaaagtctaccttgagaagacccagccggtcattgactattatagtaagaaaggtattctcaaacgcgtagatgggtcgcaaggaatcgacaacgttgtggcagaagtcctggggattctgggttggagcgataag

SEQ ID NO: 1134 - protein, 231 aa, synthetic construct
  REGION 1..231: note = Variant of adenylate kinase
MHHHHHHGGSGMGAYLVFLGPPGAGKGTQGRRISAKTGIPHISTGDILRDIVAKQNDEVASSIKEIMEKGELVPDELGNAVVKRRLSEKDCEKGFILDGFPRTVRQAEYLDSFLESQNRQLTAAVLFKVPEDEVVQRLLSRLICPKCGRIYNMIFLPPKEDELCDDCGVGLVQRDDDKEETVRHRLKVYLEKTQPVIDYYSKKGILKRVDGSQGIDNVVAEVLGILGWSDK

SEQ ID NO: 1135 - DNA, 693 bp, synthetic construct
  misc_feature 1..693: note = Variant of adenylate kinase
  source 1..693: mol_type = other DNA
atgcaccatcatcaccatcacgggggctccggcatgggggcatatctggtgttcttaggtcctccgggcgcgggaaaaggtacccaaggccgtcgcatttcggcaaagactggcatcccgcatattagcacgggcgatatcctgcgtgacatcgtcgctaaaagcaacgatgaagttgcctcgaaaattaaagagatcatggagaaaggtgaactcgttccagatgaactgggcaatgcggtagtaaaagcgcgcctgtcggagaaagactgcgaaaaaggctttattttggatggtttcccgcgtaccgtgcgccaagcggaatatctggatagttttcttgaaagccagaatcgccagttgacagccgccgtgctgttcaaagtccccgaagatgaagttgttcagcgtctgctgtctcgcctgatctgtccgaaatgcgggcgtatctacaacatgatttttctgccaccaaaagaagacgagctgtgtgacgattgcggtgtcggcttagtacagcgtgatgatgataaggaagaaacggtccgtcaccgcctgaaagtctaccttgagaagacccagccggtcattgactattatagtaagaaaggtattctcaaacgcgtagatgggagccaaggaatcgacaacgttgtggcagaagtcctggggattctgggttggagcgataag

SEQ ID NO: 1136 - protein, 231 aa, synthetic construct
  REGION 1..231: note = Variant of adenylate kinase
MHHHHHHGGSGMGAYLVFLGPPGAGKGTQGRRISAKTGIPHISTGDILRDIVAKSNDEVASKIKEIMEKGELVPDELGNAVVKARLSEKDCEKGFILDGFPRTVRQAEYLDSFLESQNRQLTAAVLFKVPEDEVVQRLLSRLICPKCGRIYNMIFLPPKEDELCDDCGVGLVQRDDDKEETVRHRLKVYLEKTQPVIDYYSKKGILKRVDGSQGIDNVVAEVLGILGWSDK

SEQ ID NO: 1137 - DNA, 693 bp, synthetic construct
  misc_feature 1..693: note = Variant of adenylate kinase
  source 1..693: mol_type = other DNA
atgcaccatcatcaccatcacgggggctccggcatgggggcatatctggtgttcttaggtcctccgggcgcgggaaaaggtacccaaggccgtcgcatttcggcaaagactggcatcccgcatattagcacgggcgatatcctgcgtgacatcgtcgctaaaagcaacgatgaagttgcctcgagcattaaagagatcatggagaaaggtgaactcgttccagatgaactgggcaatgcggtagtaaaacgccgcctgtcggagaaagactgcgaaaaaggctttattttggatggtttcccgcgtaccgtgcgccaagcggaatatctggatagttttcttgaaagccagaatcgccagttgacagccgccgtgctgttcaaagtccccgaagatgaagttgttcagcgtctgctgtctcgcctgatctgtccgaaatgcgggcgtatctacaacatgatttttctgccaccaaaagaagacgagctgtgtgacgattgcggtgtcggcttagtacagcgtgatgatgataaggaagaaacggtccgtcaccgcctgaaagtctaccttgagaagacccagccggtcattgactattatagtaagaaaggtattctcaaacgcgtagatgggaaccaaggaatcgacaacgttgtggcagaagtcctggggattctgggttggagcgataag

SEQ ID NO: 1138 - protein, 231 aa, synthetic construct
  REGION 1..231: note = Variant of adenylate kinase
MHHHHHHGGSGMGAYLVFLGPPGAGKGTQGRRISAKTGIPHISTGDILRDIVAKSNDEVASSIKEIMEKGELVPDELGNAVVKRRLSEKDCEKGFILDGFPRTVRQAEYLDSFLESQNRQLTAAVLFKVPEDEVVQRLLSRLICPKCGRIYNMIFLPPKEDELCDDCGVGLVQRDDDKEETVRHRLKVYLEKTQPVIDYYSKKGILKRVDGNQGIDNVVAEVLGILGWSDK

SEQ ID NO: 1139 - DNA, 693 bp, synthetic construct
  misc_feature 1..693: note = Variant of adenylate kinase
  source 1..693: mol_type = other DNA
atgcaccatcatcaccatcacgggggctccggcatgggggcatatctggtgttcttaggtcgtccgggcgcgggaaaaggtacccaaggccgtcgcatttcggcaaagactggcatcccgcatattagcacgggcgatatcctgcgtgacatcgtcgctaaacagaacgatgaagttgcctcgaaaattaaagagatcatggagaaaggtgaactcgttccagatgaactgggtaatgcggtagtaaaagcgcgcctgtcggagaaagactgcgaaaaaggctttattttggatggtttcccgcgtaccgtgcgccaagcggaatatctggatagttttcttgaaagccagaatcgccagttgacagccgccgtgctgttcaaagtccccgaagatgaagttgttcagcgtctgctgtctcgcctgatctgtccgaaatgcgggcgtatctacaacatgatttttctgccaccaaaagaagacgagctgtgtgacgattgcggtgtcggcttagtacagcgtgatgatgataaggaagaaacggtccgtcaccgcctgaaagtctaccatgagaagacccagccggtcattgactattatagtaagaaaggtattctcaaacgcgtagatgggtcgcaaggaatcgacaacgttgtggcagaagtcctggggattctgggttggagcgataag

SEQ ID NO: 1140 - protein, 231 aa, synthetic construct
  REGION 1..231: note = Variant of adenylate kinase
MHHHHHHGGSGMGAYLVFLGRPGAGKGTQGRRISAKTGIPHISTGDILRDIVAKQNDEVASKIKEIMEKGELVPDELGNAVVKARLSEKDCEKGFILDGFPRTVRQAEYLDSFLESQNRQLTAAVLFKVPEDEVVQRLLSRLICPKCGRIYNMIFLPPKEDELCDDCGVGLVQRDDDKEETVRHRLKVYHEKTQPVIDYYSKKGILKRVDGSQGIDNVVAEVLGILGWSDK

SEQ ID NO: 1141 - DNA, 693 bp, synthetic construct
  misc_feature 1..693: note = Variant of adenylate kinase
  source 1..693: mol_type = other DNA
atgcaccatcatcaccatcacgggggctccggcatgggggcatatctggtgttcttaggtccgccgggcgcgggaaaaggtacccaaggccgtcgcatttcggcaaagactggcatcccgcatattagcacgggcgatatcctgcgtgacatcgtcgctaagcaaaacgatgaagttgcctcgaaaattaaagagatcatggagaaaggtgaactcgttccagatgaactgggtaatgcggtagtaaaacgccgcctgtcggagaaagactgcgaaaaaggctttattttggatggtttcccgcgtaccgtgcgccaagcggaatatctggatagttttcttgaaagccagaatcgccagttgacagccgccgtgctgttcaaagtccccgaagatgaagttgttcagcgtctgctgtctcgcctgatctgtccgaaatgcgggcgtatctacaacatgatttttctgccaccaaaagaagacgagctgtgtgacgattgcggtgtcggcttagtacagcgtgatgatgataaggaagaaacggtccgtcaccgcctgaaagtctaccttgagaagacccagccggtcattgactattatagtaagaaaggtattctcaaacgcgtagatgggtcgcaaggaatcgacaacgttgttgcagaagtcctgggggctctgggttggagcgataag

SEQ ID NO: 1142 - protein, 231 aa, synthetic construct
  REGION 1..231: note = Variant of adenylate kinase
MHHHHHHGGSGMGAYLVFLGPPGAGKGTQGRRISAKTGIPHISTGDILRDIVAKQNDEVASKIKEIMEKGELVPDELGNAVVKRRLSEKDCEKGFILDGFPRTVRQAEYLDSFLESQNRQLTAAVLFKVPEDEVVQRLLSRLICPKCGRIYNMIFLPPKEDELCDDCGVGLVQRDDDKEETVRHRLKVYLEKTQPVIDYYSKKGILKRVDGSQGIDNVVAEVLGALGWSDK

SEQ ID NO: 1143 - DNA, 693 bp, synthetic construct
  misc_feature 1..693: note = Variant of adenylate kinase
  source 1..693: mol_type = other DNA
atgcaccatcatcaccatcacgggggctccggcatgggggcatatctggtgttcttaggtcgtccgggcgcgggaaaaggtacccaaggccgtcgcatttcggcaaagactggcatcccgcatattagcacgggcgatatcctgcgtgacatcgtcgctacacagaacgatgaagttgcctcgaaaattaaagagatcatggagaaaggtgaactcgttccagatgaactgggtaatgcggtagtaaaacgccgcctgtcggagaaagactgcgaaaaaggctttattttggatggtttcccgcgtaccgtgcgccaagcggaatatctggatagttttcttgaaagccagaatcgccagttgacagccgccgtgctgttcaaagtccccgaagatgaagttgttcagcgtctgctgtctcgcctgatctgtccgaaatgcgggcgtatctacaacatgatttttctgccaccaaaagaagacgagctgtgtgacgattgcggtgtcggcttagtacagcgtgatgatgataagccggaaacggtccgtcaccgcctgaaagtctaccgtgagaagacccagccggtcattgactattatagtaagaaaggtattctcaaacgcgtagatgggtcgcaaggaatcgacaacgttgtggcagaagtcctggggattctgggttggagcgataag

SEQ ID NO: 1144 - protein, 231 aa, synthetic construct
  REGION 1..231: note = Variant of adenylate kinase
MHHHHHHGGSGMGAYLVFLGRPGAGKGTQGRRISAKTGIPHISTGDILRDIVATQNDEVASKIKEIMEKGELVPDELGNAVVKRRLSEKDCEKGFILDGFPRTVRQAEYLDSFLESQNRQLTAAVLFKVPEDEVVQRLLSRLICPKCGRIYNMIFLPPKEDELCDDCGVGLVQRDDDKPETVRHRLKVYREKTQPVIDYYSKKGILKRVDGSQGIDNVVAEVLGILGWSDK

SEQ ID NO: 1145 - DNA, 693 bp, synthetic construct
  misc_feature 1..693: note = Variant of adenylate kinase
  source 1..693: mol_type = other DNA
atgcaccatcatcaccatcacgggggctccggcatgggggcatatctggtgttcttaggtccgccgggcgcgggaaaaggtacccaaggccgtcgcatttcggcaaagactggcatcccgcatattagcacgggcgatatcctgcgtgacatcgtcgctaagcaaaacgatgaagttgcgtcgaaaattaaagagatcatggagaaaggtgaactcgttccagatgaactgggtaatgcggtggtaagccgccgcctgtcggagaaagactgcgaaaaaggctttattttggatggtttcccgcgtaccgtgcgccaagcggaatatctggatagttttcttgaaagccagaatcgccagttgacagccgccgtgctgtttaaagtccccgaagatgaagttaaacagcgtctgctgtctcgcctgatctgtccgaaatgcgggcgtatctacaacatgatttttctgccaccaaaagaagacgagctgtgtgacgattgcggtgtcggcttagtacagcgtgatgatgataaggaagaaacggtccgtcaccgcctgaaagtctaccttgagaagacccagccggtcattgactattatagtaagaaaggtattctcaaacgcgtagatgggtcgcaaggaatcgacaacgttgtggcagaagtcctggggattctgggttggagcgataag

SEQ ID NO: 1146 - protein, 231 aa, synthetic construct
  REGION 1..231: note = Variant of adenylate kinase
MHHHHHHGGSGMGAYLVFLGPPGAGKGTQGRRISAKTGIPHISTGDILRDIVAKQNDEVASKIKEIMEKGELVPDELGNAVVSRRLSEKDCEKGFILDGFPRTVRQAEYLDSFLESQNRQLTAAVLFKVPEDEVKQRLLSRLICPKCGRIYNMIFLPPKEDELCDDCGVGLVQRDDDKEETVRHRLKVYLEKTQPVIDYYSKKGILKRVDGSQGIDNVVAEVLGILGWSDK

SEQ ID NO: 1147 - DNA, 693 bp, synthetic construct
  misc_feature 1..693: note = Variant of adenylate kinase
  source 1..693: mol_type = other DNA
atgcaccatcatcaccatcacgggggctccggcatgggggcatatctggtgttcttaggtccgccgggcgcgggaaaaggtacccaaggccgtattatttcggcaaagactggcatcccgcatattagcacgggcgatatcctgcgtgacatcgtcgctaagcaaaacgatgaagttgcgtcgaaaattaaagagatcatggagaaaggtgaactcgttccagatgaactgggtaatgcggtagtaaaacgccgcctgtcggagaaagactgcgaaaaaggctttattttggatggtttcccgcgtaccgtgcgccaagcggaatatctggatagttttcttgaaagccagaatcgccagttgacagccgccgtgctgttcaaagtccccgaagatgaagttgttcagcgtctgctgtctcgcctgatctgtccgaaatgcgggcgtatctacaacatgatttttctgccaccaaaagaagacgagctgtgtgacgattgcggtgtcggcttagtacagcgtttagatgataaggaagaaacggtccgtcaccgcctgaaagtctaccttgagaagacccagccggtcattgactattatagtaagaaaggtattctcaaacgcgtagatgggtcgcaaggaatcgacaacgttgtggcagaagtcctggggattctgggttggagcgataag

SEQ ID NO: 1148 - protein, 231 aa, synthetic construct
  REGION 1..231: note = Variant of adenylate kinase
MHHHHHHGGSGMGAYLVFLGPPGAGKGTQGRIISAKTGIPHISTGDILRDIVAKQNDEVASKIKEIMEKGELVPDELGNAVVKRRLSEKDCEKGFILDGFPRTVRQAEYLDSFLESQNRQLTAAVLFKVPEDEVVQRLLSRLICPKCGRIYNMIFLPPKEDELCDDCGVGLVQRLDDKEETVRHRLKVYLEKTQPVIDYYSKKGILKRVDGSQGIDNVVAEVLGILGWSDK

SEQ ID NO: 1149 - DNA, 693 bp, synthetic construct
  misc_feature 1..693: note = Variant of adenylate kinase
  source 1..693: mol_type = other DNA
atgcaccatcatcaccatcacgggggctccggcatgggggcatatctggtgttcttaggtcgtccgggcgcgggaaaaggtacccaaggccgtcgcatttcggcaaagactggcatcccgcatattagcacgggcgatatcctgcgtgacatcgtcgctacacagaacgatgaagttgcctcgaaaattaaagagatcatggagaaaggtgaactcgttccagatgaactgaccaatgcggtagtaaaacgccgcctgtcggagaaagactgcgaaaaaggctttattttggatggtttcccgcgtaccgtgcgccaagcggaatatctggatagttttcttgaaagccagaatcgccagttgacagccgccgtgctgttcaaagtccccgaagatgaagttgttcagcgtctgctgtctcgcctgatctgtccgaaatgcgggcgtatctacaacatgatttttctgccaccaaaagaagacgagctgtgtgacgattgcggtgtcggcttagtacagcgtgatgatgataaggaagaaacggtccgtcaccgcctgaaagtctaccgtgagaagacccagccggtcattgactattatagtaagaaaggtattctcaaacgcgtagatgggagccaaggaatcgacaacgttgtggcagaagtcctggggattctgggttggagcgataag

SEQ ID NO: 1150 - protein, 231 aa, synthetic construct
  REGION 1..231: note = Variant of adenylate kinase
MHHHHHHGGSGMGAYLVFLGRPGAGKGTQGRRISAKTGIPHISTGDILRDIVATQNDEVASKIKEIMEKGELVPDELTNAVVKRRLSEKDCEKGFILDGFPRTVRQAEYLDSFLESQNRQLTAAVLFKVPEDEVVQRLLSRLICPKCGRIYNMIFLPPKEDELCDDCGVGLVQRDDDKEETVRHRLKVYREKTQPVIDYYSKKGILKRVDGSQGIDNVVAEVLGILGWSDK

SEQ ID NO: 1151 - DNA, 693 bp, synthetic construct
  misc_feature 1..693: note = Variant of adenylate kinase
  source 1..693: mol_type = other DNA
atgcaccatcatcaccatcacgggggctccggcatgggggcatatctggtgttcttaggtccgccgggcgcgggaaaaggtacccaaggccgtcgcatttcggcaaagactggcatcccgcatattagcacgggcgatatcctgcgtgacatcgtcgctaagcaaaacgatgaagttgcctcggagattaaagagatcatggagaaaggtgaactcgttccagatgaactgggtaatgcggtagtaaaacgccgcctgtcggagaaagactgcgaaaaaggctttattttggatggtttcccgcgtaccgtgcgccaagcggaatatctggatagttttcttgaaagccagaatcgccagttgacagccgccgtgctgttcaaagtccccgaagatgaagttgttcagcgtctgctgtctcgcctgatctgtccgaaatgcgggcgtatctacaacatgatttttctgccaccaaaagaagacgagctgtgtgacgattgcggtgtcggcttagtacagcgtgatgatgataaggaagaaacggtccgtcaccgcctgaaagtctaccttgagaagacccagccggtcattgactattatagtaagaaaggtattctcaaacgcgtagatgggtcgcaaggaatcgacaacgttgtggcagaagtcctggggattctgggttggagcgataag

SEQ ID NO: 1152 - protein, 231 aa, synthetic construct
  REGION 1..231: note = Variant of adenylate kinase
MHHHHHHGGSGMGAYLVFLGPPGAGKGTQGRRISAKTGIPHISTGDILRDIVAKQNDEVASEIKEIMEKGELVPDELGNAVVKRRLSEKDCEKGFILDGFPRTVRQAEYLDSFLESQNRQLTAAVLFKVPEDEVVQRLLSRLICPKCGRIYNMIFLPPKEDELCDDCGVGLVQRDDDKEETVRHRLKVYLEKTQPVIDYYSKKGILKRVDGSQGIDNVVAEVLGILGWSDK

SEQ ID NO: 1153 - DNA, 693 bp, synthetic construct
  misc_feature 1..693: note = Variant of adenylate kinase
  source 1..693: mol_type = other DNA
atgcaccatcatcaccatcacgggggctccggcatgggggcatatctggtgttcttaggtcctccgggcgcgggaaaaggtacccaaggccgtcgcatttcggcaaagactggcatcccgcatattagcacgggcgatatcctgcgtgacatcgtcgctaaaagcaacgatgaagttgcctcggaaattaaagagatcatggagaaaggtgaactcgttccagatgaactgggtaatgcggtagtaaaacgccgcctgtcggagaaagactgcgaaaaaggctttattttggatggtttcccgcgtaccgtgcgccaagcggaatatctggatagttttcttgaaagccagaatcgccagttgacagccgccgtgctgttcaaagtccccgaagatgaagttgttcagcgtctgctgtctcgcctgatctgtccgaaatgcgggcgtatctacaacatgatttttctgccaccaaaagaagacgagctgtgtgacgattgcggtgtcggcttagtacagcgtgatgatgataagccggaaacggtccgtcaccgcctgaaagtctaccatgagaagacccagccggtcattgactattatagtaagaaaggtattctcaaacgcgtagatgggaaccaaggaatcgacaacgttgtggcagaagtcctggggattctgggttggagcgataag

SEQ ID NO: 1154 - protein, 231 aa, synthetic construct
  REGION 1..231: note = Variant of adenylate kinase
MHHHHHHGGSGMGAYLVFLGPPGAGKGTQGRRISAKTGIPHISTGDILRDIVAKSNDEVASEIKEIMEKGELVPDELGNAVVKRRLSEKDCEKGFILDGFPRTVRQAEYLDSFLESQNRQLTAAVLFKVPEDEVVQRLLSRLICPKCGRIYNMIFLPPKEDELCDDCGVGLVQRDDDKPETVRHRLKVYHEKTQPVIDYYSKKGILKRVDGNQGIDNVVAEVLGILGWSDK

SEQ ID NO: 1155 - DNA, 693 bp, synthetic construct
  misc_feature 1..693: note = Variant of adenylate kinase
  source 1..693: mol_type = other DNA
atgcaccatcatcaccatcatgggggctccggcatgggggcatatctggtgttcttaggtccgccgggcgcgggaaaaggtacccaaggccgtcgcatttcggcaaagactggcatcccgcatattagcacgggcgatatcctgcgtgacatcgtcgctaagcaaaacgatgaagttgcctcgaaaattaaagagatcatggagaaaggtgaactcgttccagatgaactgggtaatgcgctggtaaaacgccgcctgtcggagaaagactgcgaaaaaggctttattttggatggtttcccgcgtaccgtgcgccaagcggaatatctggatagttttcttgaaagccagaatcgccagttgacagccgccgtgctgttcaaagtccccgaagatgaagttaaacagcgtctgctgtctcgcctgatctgtccgaaatgcgggcgtatctacaacatgatttttctgccaccaaaagaagacgagctgtgtgacgattgcggtgtcggcttagtacagcgtgatgatgataaggaagaaacggtccgtcaccgcctgaaagtctaccttgagaagacccagccggtcattgactattatagtaagaaaggtattctcaaacgcgtagatgggtcgcaaggaatcgacaacgttgtggcagaagtcctggggattctgggttggagcgataag

SEQ ID NO: 1156 - protein, 231 aa, synthetic construct
  REGION 1..231: note = Variant of adenylate kinase
MHHHHHHGGSGMGAYLVFLGPPGAGKGTQGRRISAKTGIPHISTGDILRDIVAKQNDEVASKIKEIMEKGELVPDELGNALVKRRLSEKDCEKGFILDGFPRTVRQAEYLDSFLESQNRQLTAAVLFKVPEDEVKQRLLSRLICPKCGRIYNMIFLPPKEDELCDDCGVGLVQRDDDKEETVRHRLKVYLEKTQPVIDYYSKKGILKRVDGSQGIDNVVAEVLGILGWSDK

SEQ ID NO: 1157 - DNA, 693 bp, synthetic construct
  misc_feature 1..693: note = Variant of adenylate kinase
  source 1..693: mol_type = other DNA
atgcaccatcatcaccatcacgggggctccggcatgggggcatatctggtgttcttaggtcgtccgggcgcgggaaaaggtacccaaggccgtcgcatttcggcaaagactggcatcccgcatattagcacgggcgatatcctgcgtgacatcgtcgctacacagaacgatgaagttgcctcgaaaattaaagagatcatggagaaaggtgaactcgttccagatgaactgggcaatgcggtagtaaaacgccgcctgtcggagaaagactgcgaaaaaggctttattttggatggtttcccgcgtaccgtgcgccaagcggaatatctggatagttttcttgaaagccagaatcgccagttgacagccgccgtgctgttcaaagtccccgaagatgaagttgttcagcgtctgctgtctcgcctgatctgtccgaaatgcgggcgtatctacaacatgatttttctgccaccaaaagaagacgagctgtgtgacgattgcggtgtcggcttagtacagcgtgatgatgataaggaagaaacggtccgtcaccgcctgaaagtctaccatgagaagacccagccggtcattgactattatagtaagaaaggtattctcaaacgcgtagatgggagccaaggaatcgacaacgttgtggcagaagtcctggggattctgggttggagcgataag

SEQ ID NO: 1158 - protein, 231 aa, synthetic construct
  REGION 1..231: note = Variant of adenylate kinase
MHHHHHHGGSGMGAYLVFLGRPGAGKGTQGRRISAKTGIPHISTGDILRDIVATQNDEVASKIKEIMEKGELVPDELGNAVVKRRLSEKDCEKGFILDGFPRTVRQAEYLDSFLESQNRQLTAAVLFKVPEDEVVQRLLSRLICPKCGRIYNMIFLPPKEDELCDDCGVGLVQRDDDKEETVRHRLKVYHEKTQPVIDYYSKKGILKRVDGSQGIDNVVAEVLGILGWSDK

SEQ ID NO: 1159 - DNA, 693 bp, synthetic construct
  misc_feature 1..693: note = Variant of adenylate kinase
  source 1..693: mol_type = other DNA
atgcaccatcatcaccatcacgggggctccggcatgggggcatatctggtgttcttaggtcgtccgggcgcgggaaaaggtacccaaggccgtcgcatttcggcaaagactggcatcccgcatattagcacgggcgatatcctgcgtgacatcgtcgctaaaagcaacgatgaagttgcctcgaaaattaaagagatcatggagaaaggtgaactcgttccagatgaactgggcaatgcggtagtaaaagcgcgcctgtcggagaaagactgcgaaaaaggctttattttggatggtttcccgcgtaccgtgcgccaagcggaatatctggatagttttcttgaaagccagaatcgccagttgacagccgccgtgctgttcaaagtccccgaagatgaagttgttcagcgtctgctgtctcgcctgatctgtccgaaatgcgggcgtatctacaacatgatttttctgccaccaaaagaagacgagctgtgtgacgattgcggtgtcggcttagtacagcgtgatgatgataaggaagaaacggtccgtcaccgcctgaaagtctaccatgagaagacccagccggtcattgactattatagtaagaaaggtattctcaaacgcgtagatgggtcgcaaggaatcgacaacgttgtggcagaagtcctggggattctgggttggagcgataag

SEQ ID NO: 1160 - protein, 231 aa, synthetic construct
  REGION 1..231: note = Variant of adenylate kinase
MHHHHHHGGSGMGAYLVFLGRPGAGKGTQGRRISAKTGIPHISTGDILRDIVAKSNDEVASKIKEIMEKGELVPDELGNAVVKARLSEKDCEKGFILDGFPRTVRQAEYLDSFLESQNRQLTAAVLFKVPEDEVVQRLLSRLICPKCGRIYNMIFLPPKEDELCDDCGVGLVQRDDDKEETVRHRLKVYHEKTQPVIDYYSKKGILKRVDGSQGIDNVVAEVLGILGWSDK

SEQ ID NO: 1161 - DNA, 693 bp, synthetic construct
  misc_feature 1..693: note = Variant of adenylate kinase
  source 1..693: mol_type = other DNA
atgcaccatcatcaccatcacgggggctccggcatgggggcatatctggtgttcttaggtcctccgggcgcgggaaaaggtacccaaggccgtcgcatttcggcaaagactggcatcccgcatattagcacgggcgatatcctgcgtgacatcgtcgctaagcaaaacgatgaagttgcctcgagcattaaagagatcatggagaaaggtgaactcgttccagatgaactgggtaatgcggtagtaaaagcgcgcctgtcggagaaagactgcgaaaaaggctttattttggatggtttcccgcgtaccgtgcgccaagcggaatatctggatagttttcttgaaagccagaatcgccagttgacagccgccgtgctgttcaaagtccccgaagatgaagttgttcagcgtctgctgtctcgcctgatctgtccgaaatgcgggcgtatctacaacatgatttttctgccaccaaaagaagacgagctgtgtgacgattgcggtgtcggcttagtacagcgtgatgatgataaggaagaaacggtccgtcaccgcctgaaagtctaccttgagaagacccagccggtcattgactattatagtaagaaaggtattctcaaacgcgtagatgggtcgcaaggaatcgacaacgttgtggcagaagtcctggggattctgggttggagcgataag

SEQ ID NO: 1162 - protein, 231 aa, synthetic construct
  REGION 1..231: note = Variant of adenylate kinase
MHHHHHHGGSGMGAYLVFLGPPGAGKGTQGRRISAKTGIPHISTGDILRDIVAKQNDEVASSIKEIMEKGELVPDELGNAVVKARLSEKDCEKGFILDGFPRTVRQAEYLDSFLESQNRQLTAAVLFKVPEDEVVQRLLSRLICPKCGRIYNMIFLPPKEDELCDDCGVGLVQRDDDKEETVRHRLKVYLEKTQPVIDYYSKKGILKRVDGSQGIDNVVAEVLGILGWSDK

SEQ ID NO: 1163 - DNA, 693 bp, synthetic construct
  misc_feature 1..693: note = Variant of adenylate kinase
  source 1..693: mol_type = other DNA
atgcaccatcatcaccatcacgggggctccggcatgggggcatatctggtgttcttaggtcgtccgggcgcgggaaaaggtacccaaggccgtcgcatttcggcaaagactggcatcccgcatattagcacgggcgatatcctgcgtgacatcgtcgctaaaagcaacgatgaagttgcctcggaaattaaagagatcatggagaaaggtgaactcgttccagatgaactgggtaatgcggtagtaaaacgccgcctgtcggagaaagactgcgaaaaaggctttattttggatggtttcccgcgtaccgtgcgccaagcggaatatctggatagttttcttgaaagccagaatcgccagttgacagccgccgtgctgttcaaagtccccgaagatgaagttgttcagcgtctgctgtctcgcctgatctgtccgaaatgcgggcgtatctacaacatgatttttctgccaccaaaagaagacgagctgtgtgacgattgcggtgtcggcttagtacagcgtgatgatgataaggaagaaacggtccgtcaccgcctgaaagtctaccttgagaagacccagccggtcattgactattatagtaagaaaggtattctcaaacgcgtagatgggtcgcaaggaatcgacaacgttgtggcagaagtcctggggattctgggttggagcgataag

SEQ ID NO: 1164 - protein, 231 aa, synthetic construct
  REGION 1..231: note = Variant of adenylate kinase
MHHHHHHGGSGMGAYLVFLGRPGAGKGTQGRRISAKTGIPHISTGDILRDIVAKSNDEVASEIKEIMEKGELVPDELGNAVVKRRLSEKDCEKGFILDGFPRTVRQAEYLDSFLESQNRQLTAAVLFKVPEDEVVQRLLSRLICPKCGRIYNMIFLPPKEDELCDDCGVGLVQRDDDKEETVRHRLKVYLEKTQPVIDYYSKKGILKRVDGSQGIDNVVAEVLGILGWSDK

SEQ ID NO: 1165 - DNA, 693 bp, synthetic construct
  misc_feature 1..693: note = Variant of adenylate kinase
  source 1..693: mol_type = other DNA
atgcaccatcatcaccatcacgggggctccggcatgggggcatatctggtgttcttaggtcgtccgggcgcgggaaaaggtacccaaggccgtcgcatttcggcaaagactggcatcccgcatattagcacgggcgatatcctgcgtgacatcgtcgctaaacagaacgatgaagttgcctcgagcattaaagagatcatggagaaaggtgaactcgttccagatgaactgggtaatgcggtagtaaaagcgcgcctgtcggagaaagactgcgaaaaaggctttattttggatggtttcccgcgtaccgtgcgccaagcggaatatctggatagttttcttgaaagccagaatcgccagttgacagccgccgtgctgttcaaagtccccgaagatgaagttgttcagcgtctgctgtctcgcctgatctgtccgaaatgcgggcgtatctacaacatgatttttctgccaccaaaagaagacgagctgtgtgacgattgcggtgtcggcttagtacagcgtgatgatgataaggaagaaacggtccgtcaccgcctgaaagtctaccttgagaagacccagccggtcattgactattatagtaagaaaggtattctcaaacgcgtagatgggtcgcaaggaatcgacaacgttgtggcagaagtcctggggattctgggttggagcgataag

SEQ ID NO: 1166 - protein, 231 aa, synthetic construct
  REGION 1..231: note = Variant of adenylate kinase
MHHHHHHGGSGMGAYLVFLGRPGAGKGTQGRRISAKTGIPHISTGDILRDIVAKQNDEVASSIKEIMEKGELVPDELGNAVVKARLSEKDCEKGFILDGFPRTVRQAEYLDSFLESQNRQLTAAVLFKVPEDEVVQRLLSRLICPKCGRIYNMIFLPPKEDELCDDCGVGLVQRDDDKEETVRHRLKVYLEKTQPVIDYYSKKGILKRVDGSQGIDNVVAEVLGILGWSDK

SEQ ID NO: 1167 - DNA, 693 bp, synthetic construct
  misc_feature 1..693: note = Variant of adenylate kinase
  source 1..693: mol_type = other DNA
atgcaccatcatcaccatcacgggggctccggcatgggggcatatctggtgttcttaggtccgccgggcgcgggaaaaggtacccaaggccgtcgcatttcggcaaagactggcatcccgcatattagcacgggcgatatcctgcgtgacatcgtcgctaagcaaaacgatgaagttgcctcgaaaattaaagagatcatggagaaaggtgaactcgttccagatgaactgggtaatgcggtagtaaaacgccgcctgtcggagaaagactgcgaaaaaggctttattttggatggtttcccgcgtaccgtgcgccaagcggaatatctggatagttttcttgaaagccagaatcgccagttgacagccgccgtgctgttcaaagtccccgaagatgaagttatgcagcgtctgctgtctcgcctgatctgtccgaaatgcgggcgtatctacaacatgatttttctgccaccaaaagaagacgagctgtgtgacgattgcggtgtcggcttagtacagcgtgatgatgataaggaagaaacggtccgtcaccgcctgaaagtctaccttgagaagacccagccggtcattgactattatagtaagaaaggtattctcaaacgcgtagatgggtcgcaaggaatcgacaacgttgtggcagaagtcctggggattctgggttggagcgataag

SEQ ID NO: 1168 - protein, 231 aa, synthetic construct
  REGION 1..231: note = Variant of adenylate kinase
MHHHHHHGGSGMGAYLVFLGPPGAGKGTQGRRISAKTGIPHISTGDILRDIVAKQNDEVASKIKEIMEKGELVPDELGNAVVKRRLSEKDCEKGFILDGFPRTVRQAEYLDSFLESQNRQLTAAVLFKVPEDEVMQRLLSRLICPKCGRIYNMIFLPPKEDELCDDCGVGLVQRDDDKEETVRHRLKVYLEKTQPVIDYYSKKGILKRVDGSQGIDNVVAEVLGILGWSDK

SEQ ID NO: 1169 - DNA, 693 bp, synthetic construct
  misc_feature 1..693: note = Variant of adenylate kinase
  source 1..693: mol_type = other DNA
atgcaccatcatcaccatcacgggggctccggcatgggggcatatctggtgttcttaggtccgccgggcgcgggaaaaggtacccaaggccgtattatttcggcaaagactggcatcccgcatattagcacgggcgatatcctgcgtgacatcgtcgctaagcaaaacgatgaagtttcgtcgaaaattaaagagatcatggagaaaggtgaactcgttccagatgaactgggtaatgcgctggtaaaacgccgcctgtcggagaaagactgcgaaaaaggctttattttggatggtttcccgcgtaccgtgcgccaagcggaatatctggatagttttcttgaaagccagaatcgccagttgacagccgccgtgctgattaaagtccccgaagatgaagttgtgcagcgtctgctgtctcgcctgatctgtccgaaatgcgggcgtatctacaacatgatttttctgccaccaaaagaagacgagctgtgtgacgattgcggtgtcggcttagtacagcgtgatgatgataaggaagaaacggtccgtcaccgcctgaaagtctaccttgagaagacccagccggtcattgactattatagtaagaaaggtattctcaaacgcgtagatgggtcgcaaggaatcgacaacgttgtggcagaagtcctggggattctgggttggagcgataag

SEQ ID NO: 1170 - protein, 231 aa, synthetic construct
  REGION 1..231: note = Variant of adenylate kinase
MHHHHHHGGSGMGAYLVFLGPPGAGKGTQGRIISAKTGIPHISTGDILRDIVAKQNDEVSSKIKEIMEKGELVPDELGNALVKRRLSEKDCEKGFILDGFPRTVRQAEYLDSFLESQNRQLTAAVLIKVPEDEVVQRLLSRLICPKCGRIYNMIFLPPKEDELCDDCGVGLVQRDDDKEETVRHRLKVYLEKTQPVIDYYSKKGILKRVDGSQGIDNVVAEVLGILGWSDK

SEQ ID NO: 1171 - DNA, 693 bp, synthetic construct
  misc_feature 1..693: note = Variant of adenylate kinase
  source 1..693: mol_type = other DNA
atgcaccatcatcaccatcacgggggctccggcatgggggcatatctggtgttcttaggtcgtccgggcgcgggaaaaggtacccaaggccgtcgcatttcggcaaagactggcatcccgcatattagcacgggcgatatcctgcgtgacatcgtcgctacaagcaacgatgaagttgcctcggaaattaaagagatcatggagaaaggtgaactcgttccagatgaactgaccaatgcggtagtaaaacgccgcctgtcggagaaagactgcgaaaaaggctttattttggatggtttcccgcgtaccgtgcgccaagcggaatatctggatagttttcttgaaagccagaatcgccagttgacagccgccgtgctgttcaaagtccccgaagatgaagttgttcagcgtctgctgtctcgcctgatctgtccgaaatgcgggcgtatctacaacatgatttttctgccaccaaaagaagacgagctgtgtgacgattgcggtgtcggcttagtacagcgtgatgatgataaggaagaaacggtccgtcaccgcctgaaagtctaccttgagaagacccagccggtcattgactattatagtaagaaaggtattctcaaacgcgtagatgggtcgcaaggaatcgacaacgttgtggcagaagtcctggggattctgggttggagcgataag

SEQ ID NO: 1172 - protein, 231 aa, synthetic construct
  REGION 1..231: note = Variant of adenylate kinase
MHHHHHHGGSGMGAYLVFLGRPGAGKGTQGRRISAKTGIPHISTGDILRDIVATSNDEVASEIKEIMEKGELVPDELTNAVVKRRLSEKDCEKGFILDGFPRTVRQAEYLDSFLESQNRQLTAAVLFKVPEDEVVQRLLSRLICPKCGRIYNMIFLPPKEDELCDDCGVGLVQRDDDKEETVRHRLKVYLEKTQPVIDYYSKKGILKRVDGSQGIDNVVAEVLGILGWSDK

SEQ ID NO: 1173 - DNA, 693 bp, synthetic construct
  misc_feature 1..693: note = Variant of adenylate kinase
  source 1..693: mol_type = other DNA
atgcaccatcatcaccatcacgggggctccggcatgggggcatatctggtgttcttaggtccgccgggcgcgggaaaaggtacccaaggccgtcgcatttcggcaaagactggcatcccgcatattagcacgggcgatatcctgcgtgacatcgtcgctaagcaaaacgatgaagttgcctcgaaaattaaagagatcatggagaaaggtgaactcgttccagatgaactgggtaatgcggtagtaaaacgccgcctgtcggagaaagactgcgaaaaaggctttattttggatggttatccgcgtacccatcgccaagcggaatatctggatagttttcttgaaagccagaatcgccagttgacagccgccgtgctgttcaaagtccccgaagatgaagttgttcagcgtctgctgtctcgcctgatctgtccgaaatgcgggcgtatctacaacatgatttttctgccaccaaaagaagacgagctgtgtgacgattgcggtgtcggcttagtacagcgtgatgatgataaggaagaaacggtccgtcaccgcctgaaagtctaccttgagaagacccagccggtcattgactattatagtaagaaaggtattctcaaacgcgtagatgggtcgcaaggaatcgacaacgttgtggcagaagtcctggggattctgggttggagcgataag

SEQ ID NO: 1174 - protein, 231 aa, synthetic construct
  REGION 1..231: note = Variant of adenylate kinase
MHHHHHHGGSGMGAYLVFLGPPGAGKGTQGRRISAKTGIPHISTGDILRDIVAKQNDEVASKIKEIMEKGELVPDELGNAVVKRRLSEKDCEKGFILDGYPRTHRQAEYLDSFLESQNRQLTAAVLFKVPEDEVVQRLLSRLICPKCGRIYNMIFLPPKEDELCDDCGVGLVQRDDDKEETVRHRLKVYLEKTQPVIDYYSKKGILKRVDGSQGIDNVVAEVLGILGWSDK

SEQ ID NO: 1175 - DNA, 693 bp, synthetic construct
  misc_feature 1..693: note = Variant of adenylate kinase
  source 1..693: mol_type = other DNA
atgcaccatcatcaccatcacgggggctccggcatgggggcatatctggtgttcttaggtccgccgggcgcgggaaaaggtacccaaggccgtcgcatttcggcaaagactggcatcccgcatattagcacgggcgatatcctgcgtgacatcgtcgctacacagaacgatgaagttgcctcgaaaattaaagagatcatggagaaaggtgaactcgttccagatgaactgggtaatgcggtagtaaaagcgcgcctgtcggagaaagactgcgaaaaaggctttattttggatggtttcccgcgtaccgtgcgccaagcggaatatctggatagttttcttgaaagccagaatcgccagttgacagccgccgtgctgttcaaagtccccgaagatgaagttgttcagcgtctgctgtctcgcctgatctgtccgaaatgcgggcgtatctacaacatgatttttctgccaccaaaagaagacgagctgtgtgacgattgcggtgtcggcttagtacagcgtgatgatgataaggaagaaacggtccgtcaccgcctgaaagtctaccttgagaagacccagccggtcattgactattatagtaagaaaggtattctcaaacgcgtagatgggtcgcaaggaatcgacaacgttgtggcagaagtcctggggattctgggttggagcgataag

SEQ ID NO: 1176 - protein, 231 aa, synthetic construct
  REGION 1..231: note = Variant of adenylate kinase
MHHHHHHGGSGMGAYLVFLGPPGAGKGTQGRRISAKTGIPHISTGDILRDIVATQNDEVASKIKEIMEKGELVPDELGNAVVKARLSEKDCEKGFILDGFPRTVRQAEYLDSFLESQNRQLTAAVLFKVPEDEVVQRLLSRLICPKCGRIYNMIFLPPKEDELCDDCGVGLVQRDDDKEETVRHRLKVYLEKTQPVIDYYSKKGILKRVDGSQGIDNVVAEVLGILGWSDK

SEQ ID NO: 1177 - DNA, 693 bp, synthetic construct
  misc_feature 1..693: note = Variant of adenylate kinase
  source 1..693: mol_type = other DNA
atgcaccatcatcaccatcacgggggctccggcatgggggcatatctggtgttcttaggtcctccgggcgcgggaaaaggtacccaaggccgtcgcatttcggcaaagactggcatcccgcatattagcacgggcgatatcctgcgtgacatcgtcgctaaaagcaacgatgaagttgcctcgagcattaaagagatcatggagaaaggtgaactcgttccagatgaactgggcaatgcggtagtaaaacgccgcctgtcggagaaagactgcgaaaaaggctttattttggatggtttcccgcgtaccgtgcgccaagcggaatatctggatagttttcttgaaagccagaatcgccagttgacagccgccgtgctgttcaaagtccccgaagatgaagttgttcagcgtctgctgtctcgcctgatctgtccgaaatgcgggcgtatctacaacatgatttttctgccaccaaaagaagacgagctgtgtgacgattgcggtgtcggcttagtacagcgtgatgatgataagccggaaacggtccgtcaccgcctgaaagtctaccgtgagaagacccagccggtcattgactattatagtaagaaaggtattctcaaacgcgtagatgggtcgcaaggaatcgacaacgttgtggcagaagtcctggggattctgggttggagcgataag

SEQ ID NO: 1178 - protein, 231 aa, synthetic construct
  REGION 1..231: note = Variant of adenylate kinase
MHHHHHHGGSGMGAYLVFLGPPGAGKGTQGRRISAKTGIPHISTGDILRDIVAKSNDEVASSIKEIMEKGELVPDELGNAVVKRRLSEKDCEKGFILDGFPRTVRQAEYLDSFLESQNRQLTAAVLFKVPEDEVVQRLLSRLICPKCGRIYNMIFLPPKEDELCDDCGVGLVQRDDDKPETVRHRLKVYREKTQPVIDYYSKKGILKRVDGSQGIDNVVAEVLGILGWSDK

SEQ ID NO: 1179 - DNA, 693 bp, synthetic construct
  misc_feature 1..693: note = Variant of adenylate kinase
  source 1..693: mol_type = other DNA
atgcaccatcatcaccatcacgggggctccggcatgggggcatatctggtgttcttaggtcctccgggcgcgggaaaaggtacccaaggccgtcgcatttcggcaaagactggcatcccgcatattagcacgggcgatatcctgcgtgacatcgtcgctacaagcaacgatgaagttgcctcgagcattaaagagatcatggagaaaggtgaactcgttccagatgaactgggcaatgcggtagtaaaagcgcgcctgtcggagaaagactgcgaaaaaggctttattttggatggtttcccgcgtaccgtgcgccaagcggaatatctggatagttttcttgaaagccagaatcgccagttgacagccgccgtgctgttcaaagtccccgaagatgaagttgttcagcgtctgctgtctcgcctgatctgtccgaaatgcgggcgtatctacaacatgatttttctgccaccaaaagaagacgagctgtgtgacgattgcggtgtcggcttagtacagcgtgatgatgataagccggaaacggtccgtcaccgcctgaaagtctaccatgagaagacccagccggtcattgactattatagtaagaaaggtattctcaaacgcgtagatgggaaccaaggaatcgacaacgttgtggcagaagtcctggggattctgggttggagcgataag

SEQ ID NO: 1180 - protein, 231 aa, synthetic construct
  REGION 1..231: note = Variant of adenylate kinase
MHHHHHHGGSGMGAYLVFLGPPGAGKGTQGRRISAKTGIPHISTGDILRDIVATSNDEVASSIKEIMEKGELVPDELGNAVVKARLSEKDCEKGFILDGFPRTVRQAEYLDSFLESQNRQLTAAVLFKVPEDEVVQRLLSRLICPKCGRIYNMIFLPPKEDELCDDCGVGLVQRDDDKPETVRHRLKVYHEKTQPVIDYYSKKGILKRVDGNQGIDNVVAEVLGILGWSDK

SEQ ID NO: 1181 - DNA, 693 bp, synthetic construct
  misc_feature 1..693: note = Variant of adenylate kinase
  source 1..693: mol_type = other DNA
atgcaccatcatcaccatcacgggggctccggcatgggggcatatctggtgttcttaggtccgccgggcgcgggaaaaggtacccaaggccgtcgcatttcggcaaagactggcatcccgcatattagcacgggcgatatcctgcgtgacatcgtcgctaagcaaaacgatgaagttgcctcgaaaattaaagagatcatggagaaaggtgaactcgttccagatgaactgggtaatgcggtagtaaaacgccgcctgtcggagaaagactgcgaaaaaggctttattttggatggtttcccgcgtaccgtgcgccaagcggaatatctggatagttttcttgaaagccagaatcgccagttgacagccgccgtgctgttcaaagtccccgaagatgaagttgttcagcgtctgctgtctcgcctgatctgtccgaaatgcgggcgtatctacaacatgatttttctgccaccaaaagaagacgagctgtgtgacgattgcggtgtcggcttagtacagcgtgatgatgataaggaagaaacggtccgtcaccgcctgaaagtctaccgggagaagacccagccggtcattgactattatagtaagaaaggtattctcaaacgcgtagatgggtcgcaaggaatcgacaacgttgtggcagaagtcctggggattctgggttggagcgataag

SEQ ID NO: 1182 - protein, 231 aa, synthetic construct
  REGION 1..231: note = Variant of adenylate kinase
MHHHHHHGGSGMGAYLVFLGPPGAGKGTQGRRISAKTGIPHISTGDILRDIVAKQNDEVASKIKEIMEKGELVPDELGNAVVKRRLSEKDCEKGFILDGFPRTVRQAEYLDSFLESQNRQLTAAVLFKVPEDEVVQRLLSRLICPKCGRIYNMIFLPPKEDELCDDCGVGLVQRDDDKEETVRHRLKVYREKTQPVIDYYSKKGILKRVDGSQGIDNVVAEVLGILGWSDK

SEQ ID NO: 1183 - DNA, 693 bp, synthetic construct
  misc_feature 1..693: note = Variant of adenylate kinase
  source 1..693: mol_type = other DNA
atgcaccatcatcaccatcacgggggctccggcatgggggcatatctggtgttcttaggtccgccgggcgcgggaaaaggtacccaaggccgtcgcatttcggcaaagactggcatcccgcatattagcacgggcgatatcctgcgtgacatcgtcgctaagcaaaacgatgaagttgcctcgaaaattaaagagatcatggagaaaggtgaactcgttccagatgaactgggtaatgcggtagtaaaacgccgcctgtcggagaaagactgcgaaaaaggctttattttggatggtttcccgcgtaccgtgcgccaagcggaatatctggatagttttcttgaaagccagaatcgccagttgacagccgccgtgctgttcaaagtccccgaagatgaagttgttcagcgtctgctgtctcgcctgatctgtccgaaatgcgggcgtatctacaacatgatttttctgccaccaaaagaagacgagctgtgtgacgattgcggtgtcggcttagtacagcgtgatgatgataaggaagaaacggtccgtcaccgcctgaaagtctaccatgagaagacccagccggtcattgactattatagtaagaaaggtattctcaaacgcgtagatgggtcgcaaggaatcgacaacgttgtggcagaagtcctggggattctgggttggagcgataag

SEQ ID NO: 1184 - protein, 231 aa, synthetic construct
  REGION 1..231: note = Variant of adenylate kinase
MHHHHHHGGSGMGAYLVFLGPPGAGKGTQGRRISAKTGIPHISTGDILRDIVAKQNDEVASKIKEIMEKGELVPDELGNAVVKRRLSEKDCEKGFILDGFPRTVRQAEYLDSFLESQNRQLTAAVLFKVPEDEVVQRLLSRLICPKCGRIYNMIFLPPKEDELCDDCGVGLVQRDDDKEETVRHRLKVYHEKTQPVIDYYSKKGILKRVDGSQGIDNVVAEVLGILGWSDK

SEQ ID NO: 1185 - DNA, 693 bp, synthetic construct
  misc_feature 1..693: note = Variant of adenylate kinase
  source 1..693: mol_type = other DNA
atgcaccatcatcaccatcacgggggctccggcatgggggcatatctggtgttcttaggtccgccgggcgcgggaaaaggtacccaaggccgtcgcatttcggcaaagactggcatcccgcatattagcacgggcgatatcctgcgtgacatcgtcgctaagcaaaacgatgaagttgcctcgaaaattaaagagatcatggagaaaggtgaactcgttccagatgaactgggtaatgcggtagtatctcgccgcctgtcggagaaagactgcgaaaaaggctttattttggatggtttcccgcgtaccgtgcgccaagcggaatatctggatagttttcttgaaagccagaatcgccagttgacagccgccgtgctgttcaaagtccccgaagatgaagttgttcagcgtctgctgtctcgcctgatctgtccgaaatgcgggcgtatctacaacatgatttttctgccaccaaaagaagacgagctgtgtgacgattgcggtgtcggcttagtacagcgtgatgatgataaggaagaaacggtccgtcaccgcctgaaagtctaccttgagaagacccagccggtcattgactattatagtaagaaaggtattctcaaacgcgtagatgggtcgcaaggaatcgacaacgttgtggcagaagtcctggggattctgggttggagcgataag

SEQ ID NO: 1186 - protein, 231 aa, synthetic construct
  REGION 1..231: note = Variant of adenylate kinase
MHHHHHHGGSGMGAYLVFLGPPGAGKGTQGRRISAKTGIPHISTGDILRDIVAKQNDEVASKIKEIMEKGELVPDELGNAVVSRRLSEKDCEKGFILDGFPRTVRQAEYLDSFLESQNRQLTAAVLFKVPEDEVVQRLLSRLICPKCGRIYNMIFLPPKEDELCDDCGVGLVQRDDDKEETVRHRLKVYLEKTQPVIDYYSKKGILKRVDGSQGIDNVVAEVLGILGWSDK

SEQ ID NO: 1187 - DNA, 693 bp, synthetic construct
  misc_feature 1..693: note = Variant of adenylate kinase
  source 1..693: mol_type = other DNA
atgcaccatcatcaccatcacgggggctccggcatgggggcatatctggtgttcttaggtccgccgggcgcgggaaaaggtacccaaggccgtcgcatttcggcaaagactggcatcccgcatattagcacgggcgatatcctgcgtgacatcgtcgctaagcaaaacgatgaagttgcctcgaaaattaaagagatcatggagaaaggtgaactcgttccagatgaactgggtaatgcggtagtaaaacgccgcctgtcggagaaagactgcgaaaaaggctttattttggatggttatccgcgtacccggcgccaagcggaatatctggatagttttcttgaaagccagaatcgccagttgacagccgccgtgctgttcaaagtccccgaagatgaagttgttcagcgtctgctgtctcgcctgatctgtccgaaatgcgggcgtatctacaacatgatttttctgccaccaaaagaagacgagctgtgtgacgattgcggtgtcggcttagtacagcgtgatgatgataaggaagaaacggtccgtcaccgcctgaaagtctaccttgagaagacccagccggtcattgactattatagtaagaaaggtattctcaaacgcgtagatgggtcgcaaggaatcgacaacgttgtggcagaagtcctggggattctgggttggagcgataag

SEQ ID NO: 1188 - protein, 231 aa, synthetic construct
  REGION 1..231: note = Variant of adenylate kinase
MHHHHHHGGSGMGAYLVFLGPPGAGKGTQGRRISAKTGIPHISTGDILRDIVAKQNDEVASKIKEIMEKGELVPDELGNAVVKRRLSEKDCEKGFILDGYPRTRRQAEYLDSFLESQNRQLTAAVLFKVPEDEVVQRLLSRLICPKCGRIYNMIFLPPKEDELCDDCGVGLVQRDDDKEETVRHRLKVYLEKTQPVIDYYSKKGILKRVDGSQGIDNVVAEVLGILGWSDK

SEQ ID NO: 1189 - DNA, 693 bp, synthetic construct
  misc_feature 1..693: note = Variant of adenylate kinase
  source 1..693: mol_type = other DNA
atgcaccatcatcaccatcacgggggctccggcatgggggcatatctggtgttcttaggtccgccgggcgcgggaaaaggtacccaaggccgtcgcatttcggcaaagactggcatcccgcatattagcacgggcgatatcctgcgtgacatcgtcgctaagcaaaacgatgaagttgcctcgaaaattaaagagatcatggagaaaggtgaactcgttccagatgaactgactaatgcggtagtaaaacgccgcctgtcggagaaagactgcgaaaaaggctttattttggatggtttcccgcgtaccgtgcgccaagcggaatatctggatagttttcttgaaagccagaatcgccagttgacagccgccgtgctgttcaaagtccccgaagatgaagttgttcagcgtctgctgtctcgcctgatctgtccgaaatgcgggcgtatctacaacatgatttttctgccaccaaaagaagacgagctgtgtgacgattgcggtgtcggcttagtacagcgtgatgatgataaggaagaaacggtccgtcaccgcctgaaagtctaccttgagaagacccagccggtcattgactattatagtaagaaaggtattctcaaacgcgtagatgggtcgcaaggaatcgacaacgttgtggcagaagtcctggggattctgggttggagcgataag

SEQ ID NO: 1190 - protein, 231 aa, synthetic construct
  REGION 1..231: note = Variant of adenylate kinase
MHHHHHHGGSGMGAYLVFLGPPGAGKGTQGRRISAKTGIPHISTGDILRDIVAKQNDEVASKIKEIMEKGELVPDELTNAVVKRRLSEKDCEKGFILDGFPRTVRQAEYLDSFLESQNRQLTAAVLFKVPEDEVVQRLLSRLICPKCGRIYNMIFLPPKEDELCDDCGVGLVQRDDDKEETVRHRLKVYLEKTQPVIDYYSKKGILKRVDGSQGIDNVVAEVLGILGWSDK

SEQ ID NO: 1191 - DNA, 693 bp, synthetic construct
  misc_feature 1..693: note = Variant of adenylate kinase
  source 1..693: mol_type = other DNA
atgcaccatcatcaccatcacgggggctccggcatgggggcatatctggtgttcttaggtcctccgggcgcgggaaaaggtacccaaggccgtcgcatttcggcaaagactggcatcccgcatattagcacgggcgatatcctgcgtgacatcgtcgctacacagaacgatgaagttgcctcggaaattaaagagatcatggagaaaggtgaactcgttccagatgaactgggtaatgcggtagtaaaacgccgcctgtcggagaaagactgcgaaaaaggctttattttggatggtttcccgcgtaccgtgcgccaagcggaatatctggatagttttcttgaaagccagaatcgccagttgacagccgccgtgctgttcaaagtccccgaagatgaagttgttcagcgtctgctgtctcgcctgatctgtccgaaatgcgggcgtatctacaacatgatttttctgccaccaaaagaagacgagctgtgtgacgattgcggtgtcggcttagtacagcgtgatgatgataaggaagaaacggtccgtcaccgcctgaaagtctaccgtgagaagacccagccggtcattgactattatagtaagaaaggtattctcaaacgcgtagatgggtcgcaaggaatcgacaacgttgtggcagaagtcctggggattctgggttggagcgataag

SEQ ID NO: 1192 - protein, 231 aa, synthetic construct
  REGION 1..231: note = Variant of adenylate kinase
MHHHHHHGGSGMGAYLVFLGPPGAGKGTQGRRISAKTGIPHISTGDILRDIVATQNDEVASEIKEIMEKGELVPDELGNAVVKRRLSEKDCEKGFILDGFPRTVRQAEYLDSFLESQNRQLTAAVLFKVPEDEVVQRLLSRLICPKCGRIYNMIFLPPKEDELCDDCGVGLVQRDDDKEETVRHRLKVYREKTQPVIDYYSKKGILKRVDGSQGIDNVVAEVLGILGWSDK

SEQ ID NO: 1193 - DNA, 693 bp, synthetic construct
  misc_feature 1..693: note = Variant of adenylate kinase
  source 1..693: mol_type = other DNA
atgcaccatcatcaccatcacgggggctccggcatgggggcatatctggtgttcttaggtcgtccgggcgcgggaaaaggtacccaaggccgtcgcatttcggcaaagactggcatcccgcatattagcacgggcgatatcctgcgtgacatcgtcgctaaaagcaacgatgaagttgcctcggaaattaaagagatcatggagaaaggtgaactcgttccagatgaactgggcaatgcggtagtaaaacgccgcctgtcggagaaagactgcgaaaaaggctttattttggatggtttcccgcgtaccgtgcgccaagcggaatatctggatagttttcttgaaagccagaatcgccagttgacagccgccgtgctgttcaaagtccccgaagatgaagttgttcagcgtctgctgtctcgcctgatctgtccgaaatgcgggcgtatctacaacatgatttttctgccaccaaaagaagacgagctgtgtgacgattgcggtgtcggcttagtacagcgtgatgatgataagccggaaacggtccgtcaccgcctgaaagtctaccatgagaagacccagccggtcattgactattatagtaagaaaggtattctcaaacgcgtagatgggagccaaggaatcgacaacgttgtggcagaagtcctggggattctgggttggagcgataag

SEQ ID NO: 1194 - protein, 231 aa, synthetic construct
  REGION 1..231: note = Variant of adenylate kinase
MHHHHHHGGSGMGAYLVFLGRPGAGKGTQGRRISAKTGIPHISTGDILRDIVAKSNDEVASEIKEIMEKGELVPDELGNAVVKRRLSEKDCEKGFILDGFPRTVRQAEYLDSFLESQNRQLTAAVLFKVPEDEVVQRLLSRLICPKCGRIYNMIFLPPKEDELCDDCGVGLVQRDDDKPETVRHRLKVYHEKTQPVIDYYSKKGILKRVDGSQGIDNVVAEVLGILGWSDK

SEQ ID NO: 1195 - DNA, 693 bp, synthetic construct
  misc_feature 1..693: note = Variant of adenylate kinase
  source 1..693: mol_type = other DNA
atgcaccatcatcaccatcacgggggctccggcatgggggcatatctggtgttcttaggtccgccgggcgcgggaaaaggtacccaaggccgtcgcatttcggcaaagactggcatcccgcatattagcacgggcgatatcctgcgtgacatcgtcgctaagcaaaacgatgaagttgcctcgaaaattaaagagatcatggagaaaggtgaactcgttccagatgaactgtgtaatgcggtagtaaaacgccgcctgtcggagaaagactgcgaaaaaggctttattttggatggtttcccgcgtaccgtgcgccaagcggaatatctggatagttttcttgaaagccagaatcgccagttgacagccgccgtgctgttcaaagtccccgaagatgaagttgttcagcgtctgctgtctcgcctgatctgtccgaaatgcgggcgtatctacaacatgatttttctgccaccaaaagaagacgagctgtgtgacgattgcggtgtcggcttagtacagcgtgatgatgataaggaagaaacggtccgtcaccgcctgaaagtctaccttgagaagacccagccggtcattgactattatagtaagaaaggtattctcaaacgcgtagatgggtcgcaaggaatcgacaacgttgtggcagaagtcctggggattctgggttggagcgataag

SEQ ID NO: 1196 - protein, 231 aa, synthetic construct
  REGION 1..231: note = Variant of adenylate kinase
MHHHHHHGGSGMGAYLVFLGPPGAGKGTQGRRISAKTGIPHISTGDILRDIVAKQNDEVASKIKEIMEKGELVPDELCNAVVKRRLSEKDCEKGFILDGFPRTVRQAEYLDSFLESQNRQLTAAVLFKVPEDEVVQRLLSRLICPKCGRIYNMIFLPPKEDELCDDCGVGLVQRDDDKEETVRHRLKVYLEKTQPVIDYYSKKGILKRVDGSQGIDNVVAEVLGILGWSDK

SEQ ID NO: 1197 - DNA, 693 bp, synthetic construct
  misc_feature 1..693: note = Variant of adenylate kinase
  source 1..693: mol_type = other DNA
atgcaccatcatcaccatcacgggggctccggcatgggggcatatctggtgttcttaggtccgccgggcgcgggaaaaggtacccaaggccgtattatttcggcaaagactggcatcccgcatattagcacgggcgatatcctgcgtgacatcgtcgctaagcaaaacgatgaagtttcgtcgaaaattaaagagatcatggagaaaggtgaactcgttccagatgaactgggtaatgcggtagtaaaacgccgcctgtcggagaaagactgcgaaaaaggctttattttggatggtttcccgcgtaccgtgcgccaagcggaatatctggatagttttcttgaaagccagaatcgccagttgacagccgccgtgctgattaaagtccccgaagatgaagttgttcagcgtctgctgtctcgcctgatctgtccgaaatgcgggcgtatctacaacatgatttttctgccaccaaaagaagacgagctgtgtgacgattgcggtgtcggcttagtacagcgtgatgatgataaggaagaaacggtccgtcaccgcctgaaagtctaccttgagaagacccagccggtcattgactattatagtaagaaaggtattctcaaacgcgtagatgggtcgcaaggaatcgacaacgttgtggcagaagtcctggggattctgggttggagcgataag

SEQ ID NO: 1198 - protein, 231 aa, synthetic construct
  REGION 1..231: note = Variant of adenylate kinase
MHHHHHHGGSGMGAYLVFLGPPGAGKGTQGRIISAKTGIPHISTGDILRDIVAKQNDEVSSKIKEIMEKGELVPDELGNAVVKRRLSEKDCEKGFILDGFPRTVRQAEYLDSFLESQNRQLTAAVLIKVPEDEVVQRLLSRLICPKCGRIYNMIFLPPKEDELCDDCGVGLVQRDDDKEETVRHRLKVYLEKTQPVIDYYSKKGILKRVDGSQGIDNVVAEVLGILGWSDK

SEQ ID NO: 1199 - DNA, 693 bp, synthetic construct
  misc_feature 1..693: note = Variant of adenylate kinase
  source 1..693: mol_type = other DNA
atgcaccatcatcaccatcacgggggctccggcatgggggcatatctggtgttcttaggtcctccgggcgcgggaaaaggtacccaaggccgtcgcatttcggcaaagactggcatcccgcatattagcacgggcgatatcctgcgtgacatcgtcgctacacagaacgatgaagttgcctcggaaattaaagagatcatggagaaaggtgaactcgttccagatgaactgggcaatgcggtagtaaaagcgcgcctgtcggagaaagactgcgaaaaaggctttattttggatggtttcccgcgtaccgtgcgccaagcggaatatctggatagttttcttgaaagccagaatcgccagttgacagccgccgtgctgttcaaagtccccgaagatgaagttgttcagcgtctgctgtctcgcctgatctgtccgaaatgcgggcgtatctacaacatgatttttctgccaccaaaagaagacgagctgtgtgacgattgcggtgtcggcttagtacagcgtgatgatgataaggaagaaacggtccgtcaccgcctgaaagtctaccatgagaagacccagccggtcattgactattatagtaagaaaggtattctcaaacgcgtagatgggaaccaaggaatcgacaacgttgtggcagaagtcctggggattctgggttggagcgataag

SEQ ID NO: 1200 - protein, 231 aa, synthetic construct
  REGION 1..231: note = Variant of adenylate kinase
MHHHHHHGGSGMGAYLVFLGPPGAGKGTQGRRISAKTGIPHISTGDILRDIVATQNDEVASEIKEIMEKGELVPDELGNAVVKARLSEKDCEKGFILDGFPRTVRQAEYLDSFLESQNRQLTAAVLFKVPEDEVVQRLLSRLICPKCGRIYNMIFLPPKEDELCDDCGVGLVQRDDDKEETVRHRLKVYHEKTQPVIDYYSKKGILKRVDGNQGIDNVVAEVLGILGWSDK

SEQ ID NO: 1201 - DNA, 693 bp, synthetic construct
  misc_feature 1..693: note = Variant of adenylate kinase
  source 1..693: mol_type = other DNA
atgcaccatcatcaccatcacgggggctccggcatgggggcatatctggtgttcttaggtcgtccgggcgcgggaaaaggtacccaaggccgtcgcatttcggcaaagactggcatcccgcatattagcacgggcgatatcctgcgtgacatcgtcgctaaacagaacgatgaagttgcctcgagcattaaagagatcatggagaaaggtgaactcgttccagatgaactgggtaatgcggtagtaaaacgccgcctgtcggagaaagactgcgaaaaaggctttattttggatggtttcccgcgtaccgtgcgccaagcggaatatctggatagttttcttgaaagccagaatcgccagttgacagccgccgtgctgttcaaagtccccgaagatgaagttgttcagcgtctgctgtctcgcctgatctgtccgaaatgcgggcgtatctacaacatgatttttctgccaccaaaagaagacgagctgtgtgacgattgcggtgtcggcttagtacagcgtgatgatgataagccggaaacggtccgtcaccgcctgaaagtctaccttgagaagacccagccggtcattgactattatagtaagaaaggtattctcaaacgcgtagatgggtcgcaaggaatcgacaacgttgtggcagaagtcctggggattctgggttggagcgataag

SEQ ID NO: 1202 - protein, 231 aa, synthetic construct
  REGION 1..231: note = Variant of adenylate kinase
MHHHHHHGGSGMGAYLVFLGRPGAGKGTQGRRISAKTGIPHISTGDILRDIVAKQNDEVASSIKEIMEKGELVPDELGNAVVKRRLSEKDCEKGFILDGFPRTVRQAEYLDSFLESQNRQLTAAVLFKVPEDEVVQRLLSRLICPKCGRIYNMIFLPPKEDELCDDCGVGLVQRDDDKPETVRHRLKVYLEKTQPVIDYYSKKGILKRVDGSQGIDNVVAEVLGILGWSDK

SEQ ID NO: 1203 - DNA, 693 bp, synthetic construct
  misc_feature 1..693: note = Variant of adenylate kinase
  source 1..693: mol_type = other DNA
atgcaccatcatcaccatcacgggggctccggcatgggggcatatctggtgttcttaggtccgccgggcgcgggaaaaggtacccaaggccgtcgcatttcggcaaagactggcatcccgcatattagcacgggcgatatcctgcgtgacatcgtcgctaagcaaaacgatgaagttgcctcgaaaattaaagagatcatggagaaaggtgaactcgttccagatgaactgggtaatgcggtagtaaaacgccgcctgtcggagaaagactgcgaaaaaggctttattttggatggttatccgcgtacccagcgccaagcggaatatctggatagttttcttgaaagccagaatcgccagttgacagccgccgtgctgttcaaagtccccgaagatgaagttgttcagcgtctgctgtctcgcctgatctgtccgaaatgcgggcgtatctacaacatgatttttctgccaccaaaagaagacgagctgtgtgacgattgcggtgtcggcttagtacagcgtgatgatgataaggaagaaacggtccgtcaccgcctgaaagtctaccttgagaagacccagccggtcattgactattatagtaagaaaggtattctcaaacgcgtagatgggtcgcaaggaatcgacaacgttgtggcagaagtcctggggattctgggttggagcgataag

SEQ ID NO: 1204 - protein, 231 aa, synthetic construct
  REGION 1..231: note = Variant of adenylate kinase
MHHHHHHGGSGMGAYLVFLGPPGAGKGTQGRRISAKTGIPHISTGDILRDIVAKQNDEVASKIKEIMEKGELVPDELGNAVVKRRLSEKDCEKGFILDGYPRTQRQAEYLDSFLESQNRQLTAAVLFKVPEDEVVQRLLSRLICPKCGRIYNMIFLPPKEDELCDDCGVGLVQRDDDKEETVRHRLKVYLEKTQPVIDYYSKKGILKRVDGSQGIDNVVAEVLGILGWSDK

SEQ ID NO: 1205 - DNA, 693 bp, synthetic construct
  misc_feature 1..693: note = Variant of adenylate kinase
  source 1..693: mol_type = other DNA
atgcaccatcatcaccatcacgggggctccggcatgggggcatatctggtgttcttaggtccgccgggcgcgggaaaaggtacccaaggccgtcgcatttcggcaaagactggcatcccgcatattagcacgggcgatatcctgcgtgacatcgtcgctaagcaaaacgatgaagttgcctcgaaaattaaagagatcatggagaaaggtgaactcgttccagatgaactgggtaatgcggtagtaaaacgccgcctgtcggagaaagactgcgaaaaaggctttattttggatggtttcccgcgtaccgtgcgccaagcggaatatctggatagttttcttgaaagccagaatcgccagttgacagccgccgtgctgattaacgtccccgaagatgaagttgtgcagcgtctgctgtctcgcctgatctgtccgaaatgcgggcgtatctacaacatgatttttctgccaccaaaagaagacgagctgtgtgacgattgcggtgtcggcttagtacagcgtgatgatgataaggaagaaacggtccgtcaccgcctgaaagtctaccttgagaagacccagccggtcattgactattatagtaagaaaggtattctcaaacgcgtagatgggtcgcaaggaatcgacaacgttgtggcagaagtcctgggggcgctgggttggagcgataag

SEQ ID NO: 1206 - protein, 231 aa, synthetic construct
  REGION 1..231: note = Variant of adenylate kinase
MHHHHHHGGSGMGAYLVFLGPPGAGKGTQGRRISAKTGIPHISTGDILRDIVAKQNDEVASKIKEIMEKGELVPDELGNAVVKRRLSEKDCEKGFILDGFPRTVRQAEYLDSFLESQNRQLTAAVLINVPEDEVVQRLLSRLICPKCGRIYNMIFLPPKEDELCDDCGVGLVQRDDDKEETVRHRLKVYLEKTQPVIDYYSKKGILKRVDGSQGIDNVVAEVLGALGWSDK

SEQ ID NO: 1207 - DNA, 693 bp, synthetic construct
  misc_feature 1..693: note = Variant of adenylate kinase
  source 1..693: mol_type = other DNA
atgcaccatcatcaccatcacgggggctccggcatgggggcatatctggtgttcttaggtccgccgggcgcgggaaaaggtacccaaggccgtattatttcggcaaagactggcatcccgcatattagcacgggcgatatcctgcgtgacatcgtcgctaagcaaaacgatgaagttgcgtcgaaaattaaagagatcatggagaaaggtgaactcgttccagatgaactgggtaatgcggtggtaaaacgccgcctgtcggagaaagactgcgaaaaaggctttattttggatggtttcccgcgtaccgtgcgccaagcggaatatctggatagttttcttgaaagccagaatcgccagttgacagccgccgtgctgttcaaagtccccgaagatgaagttgttcagcgtctgctgtctcgcctgatctgtccgaaatgcgggcgtatctacaacatgatttttctgccaccaaaagaagacgagctgtgtgacgattgcggtgtcggcttagtacagcgtgatgatgataaggaagaaacggtccgtcaccgcctgaaagtctaccttgagaagacccagccggtcattgactattatagtaagaaaggtattctcaaacgcgtagatgggtcgcaaggaatcgacaacgttgtggcagaagtcctgggggcgctgggttggagcgataag

SEQ ID NO: 1208 - protein, 231 aa, synthetic construct
  REGION 1..231: note = Variant of adenylate kinase
MHHHHHHGGSGMGAYLVFLGPPGAGKGTQGRIISAKTGIPHISTGDILRDIVAKQNDEVASKIKEIMEKGELVPDELGNAVVKRRLSEKDCEKGFILDGFPRTVRQAEYLDSFLESQNRQLTAAVLFKVPEDEVVQRLLSRLICPKCGRIYNMIFLPPKEDELCDDCGVGLVQRDDDKEETVRHRLKVYLEKTQPVIDYYSKKGILKRVDGSQGIDNVVAEVLGALGWSDK

SEQ ID NO: 1209 - DNA, 693 bp, synthetic construct
  misc_feature 1..693: note = Variant of adenylate kinase
  source 1..693: mol_type = other DNA
atgcaccatcatcaccatcacgggggctccggcatgggggcatatctggtgttcttaggtccgccgggcgcgggaaaaggtacccaaggccgtattatttcggcaaagactggcatcccgcatattagcacgggcgatatcctgcgtgacatcgtcgctaagcaaaacgatgaagtttcgtcgaaaattaaagagatcatggagaaaggtgaactcgttccagatgaactgggtaatgcgctggtaaaacgccgcctgtcggagaaagactgcgaaaaaggctttattttggatggtttcccgcgtaccgtgcgccaagcggaatatctggatagttttcttgaaagccagaatcgccagttgacagccgccgtgctgttcaaagtccccgaagatgaagttgttcagcgtctgctgtctcgcctgatctgtccgaaatgcgggcgtatctacaacatgatttttctgccaccaaaagaagacgagctgtgtgacgattgcggtgtcggcttagtacagcgtgatgatgataaggaagaaacggtccgtcaccgcctgaaagtctaccttgagaagacccagccggtcattgactattatagtaagaaaggtattctcaaacgcgtagatgggtcgcaaggaatcgacaacgttgtggcagaagtcctggggattctgggttggagcgataag

SEQ ID NO: 1210 - protein, 231 aa, synthetic construct
  REGION 1..231: note = Variant of adenylate kinase
MHHHHHHGGSGMGAYLVFLGPPGAGKGTQGRIISAKTGIPHISTGDILRDIVAKQNDEVSSKIKEIMEKGELVPDELGNALVKRRLSEKDCEKGFILDGFPRTVRQAEYLDSFLESQNRQLTAAVLFKVPEDEVVQRLLSRLICPKCGRIYNMIFLPPKEDELCDDCGVGLVQRDDDKEETVRHRLKVYLEKTQPVIDYYSKKGILKRVDGSQGIDNVVAEVLGILGWSDK

SEQ ID NO: 1211 - DNA, 693 bp, synthetic construct
  misc_feature 1..693: note = Variant of adenylate kinase
  source 1..693: mol_type = other DNA
atgcaccatcatcaccatcacgggggctccggcatgggggcatatctggtgttcttaggtccgccgggcgcgggaaaaggtacccaaggccgtcgcatttcggcaaagactggcatcccgcatattagcacgggcgatatcctgcgtgacatcgtcgctaagcaaaacgatgaagttgcctcgaaaattaaagagatcatggagaaaggtgaactcgttccagatgaactgggtaatgcggtagtaaaacgccgcctgtcggagaaagactgcgaaaaaggctttattttggatggtttcccgcgtaccgtgcgccaagcggaatatctggatagttttcttgaaagccagaatcgccagttgacagccgccgtgctgttcaaagtccccgaagatgaagttgttcagcgtctgctgtctcgcctgatctgtccgaaatgcgggcgtatctacaacatgatttttctgccaccaaaagaagacgagctgtgtgacgattgcggtgtcggcttagtacagcgtgatgatgataaggaagaaacggtccgtcaccgcctgaaagtctaccttgagaagacccagccggtcattgactattatagtaagaaaggtattctcaaacgcgtagatgggtcgcaaggaatcgacaacgttgttgcagaagtcctgggggtgctgggttggagcgataag

SEQ ID NO: 1212 - protein, 231 aa, synthetic construct
  REGION 1..231: note = Variant of adenylate kinase
MHHHHHHGGSGMGAYLVFLGPPGAGKGTQGRRISAKTGIPHISTGDILRDIVAKQNDEVASKIKEIMEKGELVPDELGNAVVKRRLSEKDCEKGFILDGFPRTVRQAEYLDSFLESQNRQLTAAVLFKVPEDEVVQRLLSRLICPKCGRIYNMIFLPPKEDELCDDCGVGLVQRDDDKEETVRHRLKVYLEKTQPVIDYYSKKGILKRVDGSQGIDNVVAEVLGVLGWSDK

SEQ ID NO: 1213 - DNA, 693 bp, synthetic construct
  misc_feature 1..693: note = Variant of adenylate kinase
  source 1..693: mol_type = other DNA
atgcaccatcatcaccatcacgggggctccggcatgggggcatatctggtgttcttaggtccgccgggcgcgggaaaaggtacccaaggccgtcgcatttcggcaaagactggcatcccgcatattagcacgggcgatatcctgcgtgacatcgtcgctaagcaaaacgatgaagttgcctcgaaaattaaagagatcatggagaaaggtgaactcgttccagatgaactgggtaatgcgcttgtaaaacgccgcctgtcggagaaagactgcgaaaaaggctttattttggatggtttcccgcgtaccgtgcgccaagcggaatatctggatagttttcttgaaagccagaatcgccagttgacagccgccgtgctgttcaaagtccccgaagatgaagttgttcagcgtctgctgtctcgcctgatctgtccgaaatgcgggcgtatctacaacatgatttttctgccaccaaaagaagacgagctgtgtgacgattgcggtgtcggcttagtacagcgtgatgatgataaggaagaaacggtccgtcaccgcctgaaagtctaccttgagaagacccagccggtcattgactattatagtaagaaaggtattctcaaacgcgtagatgggtcgcaaggaatcgacaacgttgtggcagaagtcctggggattctgggttggagcgataag

SEQ ID NO: 1214 - protein, 231 aa, synthetic construct
  REGION 1..231: note = Variant of adenylate kinase
MHHHHHHGGSGMGAYLVFLGPPGAGKGTQGRRISAKTGIPHISTGDILRDIVAKQNDEVASKIKEIMEKGELVPDELGNALVKRRLSEKDCEKGFILDGFPRTVRQAEYLDSFLESQNRQLTAAVLFKVPEDEVVQRLLSRLICPKCGRIYNMIFLPPKEDELCDDCGVGLVQRDDDKEETVRHRLKVYLEKTQPVIDYYSKKGILKRVDGSQGIDNVVAEVLGILGWSDK

SEQ ID NO: 1215 - DNA, 693 bp, synthetic construct
  misc_feature 1..693: note = Variant of adenylate kinase
  source 1..693: mol_type = other DNA
atgcaccatcatcaccatcacgggggctccggcatgggggcatatctggtgttcttaggtccgccgggcgcgggaaaaggtacccaaggccgtcgcatttcggcaaagactggcatcccgcatattagcacgggcgatatcctccgtgacatcgtcgctactcaaaacgatgaagttgcctcgaaaattaaagagatcatggagaaaggtgaactcgttccagatgaactgggtaatgcggtagtaaaacgccgcctgtcggagaaagactgcgaaaaaggctttattttggatggtttcccgcgtaccgtgcgccaagcggaatatctggatagttttcttgaaagccagaatcgccagttgacagccgccgtgctgttcaaagtccccgaagatgaagttgttcagcgtctgctgtctcgcctgatctgtccgaaatgcgggcgtatctacaacatgatttttctgccaccaaaagaagacgagctgtgtgacgattgcggtgtcggcttagtacagcgtgatgatgataaggaagaaacggtccgtcaccgcctgaaagtctaccttgagaagacccagccggtcattgactattatagtaagaaaggtattctcaaacgcgtagatgggtcgcaaggaatcgacaacgttgtggcagaagtcctagggattctgggttggagcgataag

SEQ ID NO: 1216 - protein, 231 aa, synthetic construct
  REGION 1..231: note = Variant of adenylate kinase
MHHHHHHGGSGMGAYLVFLGPPGAGKGTQGRRISAKTGIPHISTGDILRDIVATQNDEVASKIKEIMEKGELVPDELGNAVVKRRLSEKDCEKGFILDGFPRTVRQAEYLDSFLESQNRQLTAAVLFKVPEDEVVQRLLSRLICPKCGRIYNMIFLPPKEDELCDDCGVGLVQRDDDKEETVRHRLKVYLEKTQPVIDYYSKKGILKRVDGSQGIDNVVAEVLGILGWSDK

SEQ ID NO: 1217 - DNA, 693 bp, synthetic construct
  misc_feature 1..693: note = Variant of adenylate kinase
  source 1..693: mol_type = other DNA
atgcaccatcatcaccatcacgggggctccggcatgggggcatatctggtgttcttaggtcggccgggcgcgggaaaaggtacccaaggccgtcgcatttcggcaaagactggcatcccgcatattagcacgggcgatatcctgcgtgacatcgtcgctaagcaaaacgatgaagttgcctcgaaaattaaagagatcatggagaaaggtgaactcgttccagatgaactgggtaatgcggtagtaaaacgccgcctgtcggagaaagactgcgaaaaaggctttattttggatggtttcccgcgtaccgtgcgccaagcggaatatctggatagttttcttgaaagccagaatcgccagttgacagccgccgtgctgttcaaagtccccgaagatgaagttgttcagcgtctgctgtctcgcctgatctgtccgaaatgcgggcgtatctacaacatgatttttctgccaccaaaagaagacgagctgtgtgacgattgcggtgtcggcttagtacagcgtgatgatgataaggaagaaacggtccgtcaccgcctgaaagtctaccttgagaagacccagccggtcattgactattatagtaagaaaggtattctcaaacgcgtagatgggtcgcaaggaatcgacaacgttgtggcagaagtcctggggattctgggttggagcgataag

SEQ ID NO: 1218 - protein, 231 aa, synthetic construct
  REGION 1..231: note = Variant of adenylate kinase
MHHHHHHGGSGMGAYLVFLGRPGAGKGTQGRRISAKTGIPHISTGDILRDIVAKQNDEVASKIKEIMEKGELVPDELGNAVVKRRLSEKDCEKGFILDGFPRTVRQAEYLDSFLESQNRQLTAAVLFKVPEDEVVQRLLSRLICPKCGRIYNMIFLPPKEDELCDDCGVGLVQRDDDKEETVRHRLKVYLEKTQPVIDYYSKKGILKRVDGSQGIDNVVAEVLGILGWSDK

SEQ ID NO: 1219 - DNA, 693 bp, synthetic construct
  misc_feature 1..693: note = Variant of adenylate kinase
  source 1..693: mol_type = other DNA
atgcaccatcatcaccatcacgggggctccggcatgggggcatatctggtgttcttaggtccgccgggcgcgggaaaaggtacccaaggccgtcgcatttcggcaaagactggcatcccgcatattagcacgggcgatatcctgcgtgacatcgtcgctaagcaaaacgatgaagtttcgtcgaaaattaaagagatcatggagaaaggtgaactcgttccagatgaactgggtaatgcgctggtaaaacgccgcctgtcggagaaagactgcgaaaaaggctttattttggatggtttcccgcgtaccgtgcgccaagcggaatatctggatagttttcttgaaagccagaatcgccagttgacagccgccgtgctgtttaacgtccccgaagatgaagttgtgcagcgtctgctgtctcgcctgatctgtccgaaatgcgggcgtatctacaacatgatttttctgccaccaaaagaagacgagctgtgtgacgattgcggtgtcggcttagtacagcgtttagatgataaggaagaaacggtccgtcaccgcctgaaagtctaccttgagaagacccagccggtcattgactattatagtaagaaaggtattctcaaacgcgtagatgggtcgcaaggaatcgacaacgttgtggcagaagtcctggggattctgggttggagcgataag

SEQ ID NO: 1220 - protein, 231 aa, synthetic construct
  REGION 1..231: note = Variant of adenylate kinase
MHHHHHHGGSGMGAYLVFLGPPGAGKGTQGRRISAKTGIPHISTGDILRDIVAKQNDEVSSKIKEIMEKGELVPDELGNALVKRRLSEKDCEKGFILDGFPRTVRQAEYLDSFLESQNRQLTAAVLFNVPEDEVVQRLLSRLICPKCGRIYNMIFLPPKEDELCDDCGVGLVQRLDDKEETVRHRLKVYLEKTQPVIDYYSKKGILKRVDGSQGIDNVVAEVLGILGWSDK

SEQ ID NO: 1221 - DNA, 693 bp, synthetic construct
  misc_feature 1..693: note = Variant of adenylate kinase
  source 1..693: mol_type = other DNA
atgcaccatcatcaccatcacgggggctccggcatgggggcatatctggtgttcttaggtccgccgggcgcgggaaaaggtacccaaggccgtcgcatttcggcaaagactggcatcccgcatattagcacgggcgatatcctgcgtgacatcgtcgctaagcaaaacgatgaagttgcctcgaaaattaaagagatcatggagaaaggtgaactcgttccagatgaactgggtaatgcggtagtaaaacgccgcctgtcggagaaagactgcgaaaaaggctttattttggatggtttcccgcgtaccgtgcgccaagcggaatatctggatagttttcttgaaagccagaatcgccagttgacagccgccgtgctgttcaaagtccccgaagatgaagttgttcagcgtctgctgtctcgcctgatctgtccgaaatgcgggcgtatctacaacatgatttttctgccaccaaaagaagacgagctgtgtgacgattgcggtgtcggcttagtacagcgtgatgatgataaggaagaaacggtccgtcaccgcctgaaagtctaccaggagaagacccagccggtcattgactattatagtaagaaaggtattctcaaacgcgtagatgggtcgcaaggaatcgacaacgttgtggcagaagtcctggggattctgggttggagcgataag

SEQ ID NO: 1222 - protein, 231 aa, synthetic construct
  REGION 1..231: note = Variant of adenylate kinase
MHHHHHHGGSGMGAYLVFLGPPGAGKGTQGRRISAKTGIPHISTGDILRDIVAKQNDEVASKIKEIMEKGELVPDELGNAVVKRRLSEKDCEKGFILDGFPRTVRQAEYLDSFLESQNRQLTAAVLFKVPEDEVVQRLLSRLICPKCGRIYNMIFLPPKEDELCDDCGVGLVQRDDDKEETVRHRLKVYQEKTQPVIDYYSKKGILKRVDGSQGIDNVVAEVLGILGWSDK

SEQ ID NO: 1223 - DNA, 693 bp, synthetic construct
  misc_feature 1..693: note = Variant of adenylate kinase
  source 1..693: mol_type = other DNA
atgcaccatcatcaccatcacgggggctccggcatgggggcatatctggtgttcttaggtccgccgggcgcgggaaaaggtacccaaggccgtcgcatttcggcaaagactggcatcccgcatattagcacgggcgatatcctgcgtgacatcgtcgctaagcaaaacgatgaagttgcctcgaaaattaaagagatcatggagaaaggtgaactcgttccagatgaactgggtaatgcggtagtaaaagcgcgcctgtcggagaaagactgcgaaaaaggctttattttggatggtttcccgcgtaccgtgcgccaagcggaatatctggatagttttcttgaaagccagaatcgccagttgacagccgccgtgctgttcaaagtccccgaagatgaagttgttcagcgtctgctgtctcgcctgatctgtccgaaatgcgggcgtatctacaacatgatttttctgccaccaaaagaagacgagctgtgtgacgattgcggtgtcggcttagtacagcgtgatgatgataaggaagaaacggtccgtcaccgcctgaaagtctaccttgagaagacccagccggtcattgactattatagtaagaaaggtattctcaaacgcgtagatgggtcgcaaggaatcgacaacgttgtggcagaagtcctggggattctgggttggagcgataag

SEQ ID NO: 1224 - protein, 231 aa, synthetic construct
  REGION 1..231: note = Variant of adenylate kinase
MHHHHHHGGSGMGAYLVFLGPPGAGKGTQGRRISAKTGIPHISTGDILRDIVAKQNDEVASKIKEIMEKGELVPDELGNAVVKARLSEKDCEKGFILDGFPRTVRQAEYLDSFLESQNRQLTAAVLFKVPEDEVVQRLLSRLICPKCGRIYNMIFLPPKEDELCDDCGVGLVQRDDDKEETVRHRLKVYLEKTQPVIDYYSKKGILKRVDGSQGIDNVVAEVLGILGWSDK

SEQ ID NO: 1225 - DNA, 693 bp, synthetic construct
  misc_feature 1..693: note = Variant of adenylate kinase
  source 1..693: mol_type = other DNA
atgcaccatcatcaccatcacgggggctccggcatgggggcatatctggtgttcttaggtcgtccgggcgcgggaaaaggtacccaaggccgtcgcatttcggcaaagactggcatcccgcatattagcacgggcgatatcctgcgtgacatcgtcgctaagcaaaacgatgaagttgcctcgaaaattaaagagatcatggagaaaggtgaactcgttccagatgaactgggtaatgcggtagtaaaacgccgcctgtcggagaaagactgcgaaaaaggctttattttggatggtttcccgcgtaccgtgcgccaagcggaatatctggatagttttcttgaaagccagaatcgccagttgacagccgccgtgctgttcaaagtccccgaagatgaagttgttcagcgtctgctgtctcgcctgatctgtccgaaatgcgggcgtatctacaacatgatttttctgccaccaaaagaagacgagctgtgtgacgattgcggtgtcggcttagtacagcgtgatgatgataaggaagaaacggtccgtcaccgcctgaaagtctaccgtgagaagacccagccggtcattgactattatagtaagaaaggtattctcaaacgcgtagatgggaaccaaggaatcgacaacgttgtggcagaagtcctggggattctgggttggagcgataag

SEQ ID NO: 1226 - protein, 231 aa, synthetic construct
  REGION 1..231: note = Variant of adenylate kinase
MHHHHHHGGSGMGAYLVFLGRPGAGKGTQGRRISAKTGIPHISTGDILRDIVAKQNDEVASKIKEIMEKGELVPDELGNAVVKRRLSEKDCEKGFILDGFPRTVRQAEYLDSFLESQNRQLTAAVLFKVPEDEVVQRLLSRLICPKCGRIYNMIFLPPKEDELCDDCGVGLVQRDDDKEETVRHRLKVYREKTQPVIDYYSKKGILKRVDGNQGIDNVVAEVLGILGWSDK

SEQ ID NO: 1227 - DNA, 693 bp, synthetic construct
  misc_feature 1..693: note = Variant of adenylate kinase
  source 1..693: mol_type = other DNA
atgcaccatcatcaccatcacgggggctccggcatgggggcatatctggtgttcttaggtccgccgggcgcgggaaaaggtacccaaggccgtcgcatttcggcaaagactggcatcccgcatattagcacgggcgatatcctgcgtgacatcgtcgctaagcaaaacgatgaagttgcctcgaaaattaaagagatcatggagaaaggtgaactcgttccagatgaactgggtaatgcggtagtaaaacgccgcctgtcggagaaagactgcgaaaaaggctttattttggatggtttcccgcgtaccgtgcgccaagcggaatatctggatagttttcttgaaagccagaatcgccagttgacagccgccgtgctgttcaaagtccccgaagatgaagttgttcagcgtctgctgtctcgcctgatctgtccgaaatgcgggcgtatctacaacatgatttttctgccaccaaaagaagacgagctgtgtgacgattgcggtgtcggcttagtacagcgtgatgatgataaggaagaaacggtccgtcaccgcctgaaagtctactgtgagaagacccagccggtcattgactattatagtaagaaaggtattctcaaacgcgtagatgggtcgcaaggaatcgacaacgttgtggcagaagtcctggggattctgggttggagcgataag

SEQ ID NO: 1228 - protein, 231 aa, synthetic construct
  REGION 1..231: note = Variant of adenylate kinase
MHHHHHHGGSGMGAYLVFLGPPGAGKGTQGRRISAKTGIPHISTGDILRDIVAKQNDEVASKIKEIMEKGELVPDELGNAVVKRRLSEKDCEKGFILDGFPRTVRQAEYLDSFLESQNRQLTAAVLFKVPEDEVVQRLLSRLICPKCGRIYNMIFLPPKEDELCDDCGVGLVQRDDDKEETVRHRLKVYCEKTQPVIDYYSKKGILKRVDGSQGIDNVVAEVLGILGWSDK

SEQ ID NO: 1229 - DNA, 693 bp, synthetic construct
  misc_feature 1..693: note = Variant of adenylate kinase
  source 1..693: mol_type = other DNA
atgcaccatcatcaccatcacgggggctccggcatgggggcatatctggtgttcttaggtccgccgggcgcgggaaaaggtacccaaggccgtcgcatttcggcaaagactggcatcccgcatattagcacgggcgatatcctgcgtgacatcgtcgctaagcaaaacgatgaagttgcctcgaaaattaaagagatcatggagaaaggtgaactcgttccagatgaactgggtaatgcggtagtaaaacgccgcctgtcggagaaagactgcgaaaaaggctttattttggatggtttcccgcgtaccgtgcgccaagcggaatatctggatagttttcttgaaagccagaatcgccagttgacagccgccgtgctgttcaaagtccccgaagatgaagttaagcagcgtctgctgtctcgcctgatctgtccgaaatgcgggcgtatctacaacatgatttttctgccaccaaaagaagacgagctgtgtgacgattgcggtgtcggcttagtacagcgtgatgatgataaggaagaaacggtccgtcaccgcctgaaagtctaccttgagaagacccagccggtcattgactattatagtaagaaaggtattctcaaacgcgtagatgggtcgcaaggaatcgacaacgttgtggcagaagtcctggggattctgggttggagcgataag

SEQ ID NO: 1230 - protein, 231 aa, synthetic construct
  REGION 1..231: note = Variant of adenylate kinase
MHHHHHHGGSGMGAYLVFLGPPGAGKGTQGRRISAKTGIPHISTGDILRDIVAKQNDEVASKIKEIMEKGELVPDELGNAVVKRRLSEKDCEKGFILDGFPRTVRQAEYLDSFLESQNRQLTAAVLFKVPEDEVKQRLLSRLICPKCGRIYNMIFLPPKEDELCDDCGVGLVQRDDDKEETVRHRLKVYLEKTQPVIDYYSKKGILKRVDGSQGIDNVVAEVLGILGWSDK

SEQ ID NO: 1231 - DNA, 693 bp, synthetic construct
  misc_feature 1..693: note = Variant of adenylate kinase
  source 1..693: mol_type = other DNA
atgcaccatcatcaccatcacgggggctccggcatgggggcatatctggtgttcttaggtccgccgggcgcgggaaaaggtacccaaggccgtcgcatttcggcaaagactggcatcccgcatattagcacgggcgatatcctgcgtgacatcgtcgctaagcaaaacgatgaagtttcgtcgaaaattaaagagatcatggagaaaggtgaactcgttccagatgaactgggtaatgcggtagtaaaacgccgcctgtcggagaaagactgcgaaaaaggctttattttggatggtttcccgcgtaccgtgcgccaagcggaatatctggatagttttcttgaaagccagaatcgccagttgacagccgccgtgctgtttaacgtccccgaagatgaagttgttcagcgtctgctgtctcgcctgatctgtccgaaatgcgggcgtatctacaacatgatttttctgccaccaaaagaagacgagctgtgtgacgattgcggtgtcggcttagtacagcgtgatgatgataaggaagaaacggtccgtcaccgcctgaaagtctaccttgagaagacccagccggtcattgactattatagtaagaaaggtattctcaaacgcgtagatgggtcgcaaggaatcgacaacgttgtggcagaagtcctgggggcgctgggttggagcgataag

SEQ ID NO: 1232 - protein, 231 aa, synthetic construct
  REGION 1..231: note = Variant of adenylate kinase
MHHHHHHGGSGMGAYLVFLGPPGAGKGTQGRRISAKTGIPHISTGDILRDIVAKQNDEVSSKIKEIMEKGELVPDELGNAVVKRRLSEKDCEKGFILDGFPRTVRQAEYLDSFLESQNRQLTAAVLFNVPEDEVVQRLLSRLICPKCGRIYNMIFLPPKEDELCDDCGVGLVQRDDDKEETVRHRLKVYLEKTQPVIDYYSKKGILKRVDGSQGIDNVVAEVLGALGWSDK

SEQ ID NO: 1233 - DNA, 693 bp, synthetic construct
  misc_feature 1..693: note = Variant of adenylate kinase
  source 1..693: mol_type = other DNA
atgcaccatcatcaccatcacgggggctccggcatgggggcatatctggtgttcttaggtccgccgggcgcgggaaaaggtacccaaggccgtcgcatttcggcaaagactggcatcccgcatattagcacgggcgatatcctgcgtgacatcgtcgctaagcaaaacgatgaagttgcctcgaaaattaaagagatcatggagaaaggtgaactcgttccagatgaactgggtaatgcggtagtaaaacgccgcctgtcggagaaagactgcgaaaaaggctttattttggatggtttcccgcgtaccgtgcgccaagcggaatatctggatagttttcttgaaagccagaatcgccagttgacagccgccgtgctgttcaaagtccccgaagatgaagttgttcagcgtctgctgtctcgcctgatctgtccgaaatgcgggcgtatctacaacatgatttttctgccaccaaaagaagacgagctgtgtgacgattgcggtgtcggcttagtacagcgtgatgatgataaggaagaaacggtccgtcaccgcctgaaagtctaccttgagaagacccagccggtcattgactattatagtaagaaaggtattctcaaacgcgtagatgggtcgcaaggaatcgacaacgttgttgcagaagtcctggggacgctgggttggagcgataag

SEQ ID NO: 1234 - protein, 231 aa, synthetic construct
  REGION 1..231: note = Variant of adenylate kinase
MHHHHHHGGSGMGAYLVFLGPPGAGKGTQGRRISAKTGIPHISTGDILRDIVAKQNDEVASKIKEIMEKGELVPDELGNAVVKRRLSEKDCEKGFILDGFPRTVRQAEYLDSFLESQNRQLTAAVLFKVPEDEVVQRLLSRLICPKCGRIYNMIFLPPKEDELCDDCGVGLVQRDDDKEETVRHRLKVYLEKTQPVIDYYSKKGILKRVDGSQGIDNVVAEVLGTLGWSDK

SEQ ID NO: 1235 - DNA, 693 bp, synthetic construct
  misc_feature 1..693: note = Variant of adenylate kinase
  source 1..693: mol_type = other DNA
atgcaccatcatcaccatcacgggggctccggcatgggggcatatctggtgttcttaggtccgccgggcgcgggaaaaggtacccaaggccgtcgcatttcggcaaagactggcatcccgcatattagcacgggcgatatcctgcgtgacatcgtcgctaagcaaaacgatgaagttgcctcgggtattaaagagatcatggagaaaggtgaactcgttccagatgaactgggtaatgcggtagtaaaacgccgcctgtcggagaaagactgcgaaaaaggctttattttggatggtttcccgcgtaccgtgcgccaagcggaatatctggatagttttcttgaaagccagaatcgccagttgacagccgccgtgctgttcaaagtccccgaagatgaagttgttcagcgtctgctgtctcgcctgatctgtccgaaatgcgggcgtatctacaacatgatttttctgccaccaaaagaagacgagctgtgtgacgattgcggtgtcggcttagtacagcgtgatgatgataaggaagaaacggtccgtcaccgcctgaaagtctaccttgagaagacccagccggtcattgactattatagtaagaaaggtattctcaaacgcgtagatgggtcgcaaggaatcgacaacgttgtggcagaagtcctggggattctgggttggagcgataag

SEQ ID NO: 1236 - protein, 231 aa, synthetic construct
  REGION 1..231: note = Variant of adenylate kinase
MHHHHHHGGSGMGAYLVFLGPPGAGKGTQGRRISAKTGIPHISTGDILRDIVAKQNDEVASGIKEIMEKGELVPDELGNAVVKRRLSEKDCEKGFILDGFPRTVRQAEYLDSFLESQNRQLTAAVLFKVPEDEVVQRLLSRLICPKCGRIYNMIFLPPKEDELCDDCGVGLVQRDDDKEETVRHRLKVYLEKTQPVIDYYSKKGILKRVDGSQGIDNVVAEVLGILGWSDK

SEQ ID NO: 1237 - DNA, 693 bp, synthetic construct
  misc_feature 1..693: note = Variant of adenylate kinase
  source 1..693: mol_type = other DNA
atgcaccatcatcaccatcacgggggctccggcatgggggcatatctggtgttcttaggtccgccgggcgcgggaaaaggtacccaaggccgtcgcatttcggcaaagactggcatcccgcatattagcacgggcgatatcctgcgtgacatcgtcgctaagcaaaacgatgaagttgcctcgaaaattaaagagatcatggagaaaggtgaactcgttccagatgaactgggtaatgcggtagtaaaacgccgcctgtcggagaaagactgcgaaaaaggctttattttggatggtttcccgcgtaccgtgcgccaagcggaatatctggatagttttcttgaaagccagaatcgccagttgacagccgccgtgctgttcaaagtccccgaagatgaagttgttcagcgtctgctgtctcgcctgatctgtccgaaatgcgggcgtatctacaacatgatttttctgccaccaaaagaagacgagctgtgtgacgattgcggtgtcggcttagtacagcgtgatgatgataaggaagaaacggtccgtcaccgcctgaaagtctaccttgagaagacccagccggtcattgactattatagtaagaaaggtattctcaaacgcgtagatgggtcgcaaggaatcgacaacgttgttgcagaagtcctggggcagctgggttggagcgataag

SEQ ID NO: 1238 - protein, 231 aa, synthetic construct
  REGION 1..231: note = Variant of adenylate kinase
MHHHHHHGGSGMGAYLVFLGPPGAGKGTQGRRISAKTGIPHISTGDILRDIVAKQNDEVASKIKEIMEKGELVPDELGNAVVKRRLSEKDCEKGFILDGFPRTVRQAEYLDSFLESQNRQLTAAVLFKVPEDEVVQRLLSRLICPKCGRIYNMIFLPPKEDELCDDCGVGLVQRDDDKEETVRHRLKVYLEKTQPVIDYYSKKGILKRVDGSQGIDNVVAEVLGQLGWSDK

SEQ ID NO: 1239 - DNA, 693 bp, synthetic construct
  misc_feature 1..693: note = Variant of adenylate kinase
  source 1..693: mol_type = other DNA
atgcaccatcatcaccatcacgggggctccggcatgggggcatatctggtgttcttaggtccgccgggcgcgggaaaaggtacccaaggccgtcgcatttcggcaaagactggcatcccgcatattagcacgggcgatatcctgcgtgacatcgtcgctaagcaaaacgatgaagttgcctcgaaaattaaagagatcatggagaaaggtgaactcgttccagatgaactgggtaatgcggtagtaaaacgccgcctgtcggagaaagactgcgaaaaaggctttattttggatggtttcccgcgtaccgtgcgccaagcggaatatctggatagttttcttgaaagccagaatcgccagttgacagccgccgtgctgttcaaagtccccgaagatgaagttgttcagcgtctgctgtctcgcctgatctgtccgaaatgcgggcgtatctacaacatgatttttctgccaccaaaagaagacgagctgtgtgacgattgcggtgtcggcttagtacagcgtgatgatgataagcctgaaacggtccgtcaccgcctgaaagtctaccttgagaagacccagccggtcattgactattatagtaagaaaggtattctcaaacgcgtagatgggtcgcaaggaatcgacaacgttgtggcagaagtcctggggattctgggttggagcgataag

SEQ ID NO: 1240 - protein, 231 aa, synthetic construct
  REGION 1..231: note = Variant of adenylate kinase
MHHHHHHGGSGMGAYLVFLGPPGAGKGTQGRRISAKTGIPHISTGDILRDIVAKQNDEVASKIKEIMEKGELVPDELGNAVVKRRLSEKDCEKGFILDGFPRTVRQAEYLDSFLESQNRQLTAAVLFKVPEDEVVQRLLSRLICPKCGRIYNMIFLPPKEDELCDDCGVGLVQRDDDKPETVRHRLKVYLEKTQPVIDYYSKKGILKRVDGSQGIDNVVAEVLGILGWSDK

SEQ ID NO: 1241 - DNA, 693 bp, synthetic construct
  misc_feature 1..693: note = Variant of adenylate kinase
  source 1..693: mol_type = other DNA
atgcaccatcatcaccatcacgggggctccggcatgggggcatatctggtgttcttaggtccgccgggcgcgggaaaaggtacccaaggccgtcgcatttcggcaaagactggcatcccgcatattagcacgggcgatatcctgcgtgacatcgtcgctaagcaaaacgatgaagttgcctcgaaaattaaagagatcatggagaaaggtgaactcgttccagatgaactgggtaatgcggtagtaaaacgccgcctgtcggagaaagactgcgaaaaaggctttattttggatggtttcccgcgtaccgtgcgccaagcggaatatctggatagttttcttgaaagccagaatcgccagttgacagccgccgtgctgttcaaagtccccgaagatgaagttgttcagcgtctgctgtctcgcctgatctgtccgaaatgcgggcgtatctacaacatgatttttctgccaccaaaagaagacgagctgtgtgacgattgcggtgtcggcttagtacagcgtgatgatgataaggaagaaacggtccgtcaccgcctgaaagtctaccttgagaagacccagccggtcattgactattatagtaagaaaggtattctcaaacgcgtagatgggtcgcaaggaatcgacaacgttgttgcagaagtcctggggcggctgggttggagcgataag

SEQ ID NO: 1242 - protein, 231 aa, synthetic construct
  REGION 1..231: note = Variant of adenylate kinase
MHHHHHHGGSGMGAYLVFLGPPGAGKGTQGRRISAKTGIPHISTGDILRDIVAKQNDEVASKIKEIMEKGELVPDELGNAVVKRRLSEKDCEKGFILDGFPRTVRQAEYLDSFLESQNRQLTAAVLFKVPEDEVVQRLLSRLICPKCGRIYNMIFLPPKEDELCDDCGVGLVQRDDDKEETVRHRLKVYLEKTQPVIDYYSKKGILKRVDGSQGIDNVVAEVLGRLGWSDK

SEQ ID NO: 1243 - DNA, 693 bp, synthetic construct
  misc_feature 1..693: note = Variant of adenylate kinase
  source 1..693: mol_type = other DNA
atgcaccatcatcaccatcacgggggctccggcatgggggcatatctggtgttcttaggtccgccgggcgcgggaaaaggtacccaaggccgtcgcatttcggcaaagactggcatcccgcatattagcacgggcgatatcctgcgtgacatcgtcgctaagcaaaacgatgaagttgcctcgaaaattaaagagatcatggagaaaggtgaactcgttccagatgaactgggtaatgcggtagtaaaacgccgcctgtcggagaaagactgcgaaaaaggctttattttggatggttatccgcgtacctctcgccaagcggaatatctggatagttttcttgaaagccagaatcgccagttgacagccgccgtgctgttcaaagtccccgaagatgaagttgttcagcgtctgctgtctcgcctgatctgtccgaaatgcgggcgtatctacaacatgatttttctgccaccaaaagaagacgagctgtgtgacgattgcggtgtcggcttagtacagcgtgatgatgataaggaagaaacggtccgtcaccgcctgaaagtctaccttgagaagacccagccggtcattgactattatagtaagaaaggtattctcaaacgcgtagatgggtcgcaaggaatcgacaacgttgtggcagaagtcctggggattctgggttggagcgataag

SEQ ID NO: 1244 - protein, 231 aa, synthetic construct
  REGION 1..231: note = Variant of adenylate kinase
MHHHHHHGGSGMGAYLVFLGPPGAGKGTQGRRISAKTGIPHISTGDILRDIVAKQNDEVASKIKEIMEKGELVPDELGNAVVKRRLSEKDCEKGFILDGYPRTSRQAEYLDSFLESQNRQLTAAVLFKVPEDEVVQRLLSRLICPKCGRIYNMIFLPPKEDELCDDCGVGLVQRDDDKEETVRHRLKVYLEKTQPVIDYYSKKGILKRVDGSQGIDNVVAEVLGILGWSDK

SEQ ID NO: 1245 - DNA, 693 bp, synthetic construct
  misc_feature 1..693: note = Variant of adenylate kinase
  source 1..693: mol_type = other DNA
atgcaccatcatcaccatcacgggggctccggcatgggggcatatctggtgttcttaggtccgccgggcgcgggaaaaggtacccaaggccgtcgcatttcggcaaagactggcatcccgcatattagcacgggcgatatcctgcgtgacatcgtcgctaagcaaaacgatgaagttgcctcgaaaattaaagagatcatggagaaaggtgaactcgttccagatgaactgggtaatgcggtagtacatcgccgcctgtcggagaaagactgcgaaaaaggctttattttggatggtttcccgcgtaccgtgcgccaagcggaatatctggatagttttcttgaaagccagaatcgccagttgacagccgccgtgctgttcaaagtccccgaagatgaagttgttcagcgtctgctgtctcgcctgatctgtccgaaatgcgggcgtatctacaacatgatttttctgccaccaaaagaagacgagctgtgtgacgattgcggtgtcggcttagtacagcgtgatgatgataaggaagaaacggtccgtcaccgcctgaaagtctaccttgagaagacccagccggtcattgactattatagtaagaaaggtattctcaaacgcgtagatgggtcgcaaggaatcgacaacgttgtggcagaagtcctggggattctgggttggagcgataag

SEQ ID NO: 1246 - protein, 231 aa, synthetic construct
  REGION 1..231: note = Variant of adenylate kinase
MHHHHHHGGSGMGAYLVFLGPPGAGKGTQGRRISAKTGIPHISTGDILRDIVAKQNDEVASKIKEIMEKGELVPDELGNAVVHRRLSEKDCEKGFILDGFPRTVRQAEYLDSFLESQNRQLTAAVLFKVPEDEVVQRLLSRLICPKCGRIYNMIFLPPKEDELCDDCGVGLVQRDDDKEETVRHRLKVYLEKTQPVIDYYSKKGILKRVDGSQGIDNVVAEVLGILGWSDK

SEQ ID NO: 1247 - DNA, 693 bp, synthetic construct
  misc_feature 1..693: note = Variant of adenylate kinase
  source 1..693: mol_type = other DNA
atgcaccatcatcaccatcacgggggctccggcatgggggcatatctggtgttcttaggtcgtccgggcgcgggaaaaggtacccaaggccgtcgcatttcggcaaagactggcatcccgcatattagcacgggcgatatcctgcgtgacatcgtcgctaaaagcaacgatgaagttgcctcggaaattaaagagatcatggagaaaggtgaactcgttccagatgaactgggcaatgcggtagtaaaacgccgcctgtcggagaaagactgcgaaaaaggctttattttggatggtttcccgcgtaccgtgcgccaagcggaatatctggatagttttcttgaaagccagaatcgccagttgacagccgccgtgctgttcaaagtccccgaagatgaagttgttcagcgtctgctgtctcgcctgatctgtccgaaatgcgggcgtatctacaacatgatttttctgccaccaaaagaagacgagctgtgtgacgattgcggtgtcggcttagtacagcgtgatgatgataaggaagaaacggtccgtcaccgcctgaaagtctaccgtgagaagacccagccggtcattgactattatagtaagaaaggtattctcaaacgcgtagatgggagccaaggaatcgacaacgttgtggcagaagtcctggggattctgggttggagcgataag

SEQ ID NO: 1248 - protein, 231 aa, synthetic construct
  REGION 1..231: note = Variant of adenylate kinase
MHHHHHHGGSGMGAYLVFLGRPGAGKGTQGRRISAKTGIPHISTGDILRDIVAKSNDEVASEIKEIMEKGELVPDELGNAVVKRRLSEKDCEKGFILDGFPRTVRQAEYLDSFLESQNRQLTAAVLFKVPEDEVVQRLLSRLICPKCGRIYNMIFLPPKEDELCDDCGVGLVQRDDDKEETVRHRLKVYREKTQPVIDYYSKKGILKRVDGSQGIDNVVAEVLGILGWSDK

SEQ ID NO: 1249 - DNA, 693 bp, synthetic construct
  misc_feature 1..693: note = Variant of adenylate kinase
  source 1..693: mol_type = other DNA
atgcaccatcatcaccatcacgggggctccggcatgggggcatatctggtgttcttaggtccgccgggcgcgggaaaaggtacccaaggccgtcgcatttcggcaaagactggcatcccgcatattagcacgggcgatatcctgcgtgacatcgtcgctaagcaaaacgatgaagttgcctcgaaaattaaagagatcatggagaaaggtgaactcgttccagatgaactgggtaatgcggtagtaaaacgccgcctgtcggagaaagactgcgaaaaaggctttattttggatggttatccgcgtacctggcgccaagcggaatatctggatagttttcttgaaagccagaatcgccagttgacagccgccgtgctgttcaaagtccccgaagatgaagttgttcagcgtctgctgtctcgcctgatctgtccgaaatgcgggcgtatctacaacatgatttttctgccaccaaaagaagacgagctgtgtgacgattgcggtgtcggcttagtacagcgtgatgatgataaggaagaaacggtccgtcaccgcctgaaagtctaccttgagaagacccagccggtcattgactattatagtaagaaaggtattctcaaacgcgtagatgggtcgcaaggaatcgacaacgttgtggcagaagtcctggggattctgggttggagcgataag

SEQ ID NO: 1250 - protein, 231 aa, synthetic construct
  REGION 1..231: note = Variant of adenylate kinase
MHHHHHHGGSGMGAYLVFLGPPGAGKGTQGRRISAKTGIPHISTGDILRDIVAKQNDEVASKIKEIMEKGELVPDELGNAVVKRRLSEKDCEKGFILDGYPRTWRQAEYLDSFLESQNRQLTAAVLFKVPEDEVVQRLLSRLICPKCGRIYNMIFLPPKEDELCDDCGVGLVQRDDDKEETVRHRLKVYLEKTQPVIDYYSKKGILKRVDGSQGIDNVVAEVLGILGWSDK

SEQ ID NO: 1251 - DNA, 693 bp, synthetic construct
  misc_feature 1..693: note = Variant of adenylate kinase
  source 1..693: mol_type = other DNA
atgcaccatcatcaccatcacgggggctccggcatgggggcatatctggtgttcttaggtccgccgggcgcgggaaaaggtacccaaggccgtcgcatttcggcaaagactggcatcccgcatattagcacgggcgatatcctgcgtgacatcgtcgctaagcaaaacgatgaagttgcctcgaaaattaaagagatcatggagaaaggtgaactcgttccagatgaactgggtaatgcggtagtaaaacgccgcctgtcggagaaagactgcgaaaaaggctttattttggatggtttcccgcgtaccgtgcgccaagcggaatatctggatagttttcttgaaagccagaatcgccagttgacagccgccgtgctgttcaaagtccccgaagatgaagttgttcagcgtctgctgtctcgcctgatctgtccgaaatgcgggcgtatctacaacatgatttttctgccaccaaaagaagacgagctgtgtgacgattgcggtgtcggcttagtacagcgtgatgatgataaggaagaaacggtccgtcaccgcctgaaagtctacggtgagaagacccagccggtcattgactattatagtaagaaaggtattctcaaacgcgtagatgggtcgcaaggaatcgacaacgttgtggcagaagtcctggggattctgggttggagcgataag

SEQ ID NO: 1252 - protein, 231 aa, synthetic construct
  REGION 1..231: note = Variant of adenylate kinase
MHHHHHHGGSGMGAYLVFLGPPGAGKGTQGRRISAKTGIPHISTGDILRDIVAKQNDEVASKIKEIMEKGELVPDELGNAVVKRRLSEKDCEKGFILDGFPRTVRQAEYLDSFLESQNRQLTAAVLFKVPEDEVVQRLLSRLICPKCGRIYNMIFLPPKEDELCDDCGVGLVQRDDDKEETVRHRLKVYGEKTQPVIDYYSKKGILKRVDGSQGIDNVVAEVLGILGWSDK

SEQ ID NO: 1253 - DNA, 693 bp, synthetic construct
  misc_feature 1..693: note = Variant of adenylate kinase
  source 1..693: mol_type = other DNA
atgcaccatcatcaccatcacgggggctccggcatgggggcatatctggtgttcttaggtccgccgggcgcgggaaaaggtacccaaggccgtcgcatttcggcaaagactggcatcccgcatattagcacgggcgatatcctgcgtgacatcgtcgctaagcaaaacgatgaagttgcctcgaaaattaaagagatcatggagaaaggtgaactcgttccagatgaactgggtaatgcggtagtaaaacgccgcctgtcggagaaagactgcgaaaaaggctttattttggatggtttcccgcgtaccgtgcgccaagcggaatatctggatagttttcttgaaagccagaatcgccagttgacagccgccgtgctgttcaatgtccccgaagatgaagttgttcagcgtctgctgtctcgcctgatctgtccgaaatgcgggcgtatctacaacatgatttttctgccaccaaaagaagacgagctgtgtgacgattgcggtgtcggcttagtacagcgtgatgatgataaggaagaaacggtccgtcaccgcctgaaagtctaccttgagaagacccagccggtcattgactattatagtaagaaaggtattctcaaacgcgtagatgggtcgcaaggaatcgacaacgttgtggcagaagtcctggggattctgggttggagcgataag

SEQ ID NO: 1254 - protein, 231 aa, synthetic construct
  REGION 1..231: note = Variant of adenylate kinase
MHHHHHHGGSGMGAYLVFLGPPGAGKGTQGRRISAKTGIPHISTGDILRDIVAKQNDEVASKIKEIMEKGELVPDELGNAVVKRRLSEKDCEKGFILDGFPRTVRQAEYLDSFLESQNRQLTAAVLFNVPEDEVVQRLLSRLICPKCGRIYNMIFLPPKEDELCDDCGVGLVQRDDDKEETVRHRLKVYLEKTQPVIDYYSKKGILKRVDGSQGIDNVVAEVLGILGWSDK

SEQ ID NO: 1255 - DNA, 693 bp, synthetic construct
  misc_feature 1..693: note = Variant of adenylate kinase
  source 1..693: mol_type = other DNA
atgcaccatcatcaccatcacgggggctccggcatgggggcatatctggtgttcttaggtccgccgggcgcgggaaaaggtacccaaggccgtcgcatttcggcaaagactggcatcccgcatattagcacgggcgatatcctgcgtgacatcgtcgctaagcaaaacgatgaagttgcctcgaaaattaaagagatcatggagaaaggtgaactcgttccagatgaactgggtaatgcggtagtaaaaatgcgcctgtcggagaaagactgcgaaaaaggctttattttggatggtttcccgcgtaccgtgcgccaagcggaatatctggatagttttcttgaaagccagaatcgccagttgacagccgccgtgctgttcaaagtccccgaagatgaagttgttcagcgtctgctgtctcgcctgatctgtccgaaatgcgggcgtatctacaacatgatttttctgccaccaaaagaagacgagctgtgtgacgattgcggtgtcggcttagtacagcgtgatgatgataaggaagaaacggtccgtcaccgcctgaaagtctaccttgagaagacccagccggtcattgactattatagtaagaaaggtattctcaaacgcgtagatgggtcgcaaggaatcgacaacgttgtggcagaagtcctggggattctgggttggagcgataag

SEQ ID NO: 1256 - protein, 231 aa, synthetic construct
  REGION 1..231: note = Variant of adenylate kinase
MHHHHHHGGSGMGAYLVFLGPPGAGKGTQGRRISAKTGIPHISTGDILRDIVAKQNDEVASKIKEIMEKGELVPDELGNAVVKMRLSEKDCEKGFILDGFPRTVRQAEYLDSFLESQNRQLTAAVLFKVPEDEVVQRLLSRLICPKCGRIYNMIFLPPKEDELCDDCGVGLVQRDDDKEETVRHRLKVYLEKTQPVIDYYSKKGILKRVDGSQGIDNVVAEVLGILGWSDK

SEQ ID NO: 1257 - DNA, 693 bp, synthetic construct
  misc_feature 1..693: note = Variant of adenylate kinase
  source 1..693: mol_type = other DNA
atgcaccatcatcaccatcacgggggctccggcatgggggcatatctggtgttcttaggtccgccgggcgcgggaaaaggtacccaaggccgtcgcatttcggcaaagactggcatcccgcatattagcacgggcgatatcctgcgtgacatcgtcgctaagcaaaacgatgaagtttcttcgaaaattaaagagatcatggagaaaggtgaactcgttccagatgaactgggtaatgcggtagtaaaacgccgcctgtcggagaaagactgcgaaaaaggctttattttggatggtttcccgcgtaccgtgcgccaagcggaatatctggatagttttcttgaaagccagaatcgccagttgacagccgccgtgctgttcaaagtccccgaagatgaagttgttcagcgtctgctgtctcgcctgatctgtccgaaatgcgggcgtatctacaacatgatttttctgccaccaaaagaagacgagctgtgtgacgattgcggtgtcggcttagtacagcgtgatgatgataaggaagaaacggtccgtcaccgcctgaaagtctaccttgagaagacccagccggtcattgactattatagtaagaaaggtattctcaaacgcgtagatgggtcgcaaggaatcgacaacgttgtggcagaagtcctggggattctgggttggagcgataag

SEQ ID NO: 1258 - protein, 231 aa, synthetic construct
  REGION 1..231: note = Variant of adenylate kinase
MHHHHHHGGSGMGAYLVFLGPPGAGKGTQGRRISAKTGIPHISTGDILRDIVAKQNDEVSSKIKEIMEKGELVPDELGNAVVKRRLSEKDCEKGFILDGFPRTVRQAEYLDSFLESQNRQLTAAVLFKVPEDEVVQRLLSRLICPKCGRIYNMIFLPPKEDELCDDCGVGLVQRDDDKEETVRHRLKVYLEKTQPVIDYYSKKGILKRVDGSQGIDNVVAEVLGILGWSDK

SEQ ID NO: 1259 - DNA, 693 bp, synthetic construct
  misc_feature 1..693: note = Variant of adenylate kinase
  source 1..693: mol_type = other DNA
atgcaccatcatcaccatcacgggggctccggcatgggggcatatctggtgttcttaggtccgccgggcgcgggaaaaggtacccaaggccgtcgcatttcggcaaagactggcatcccgcatattagcacgggcgatatcctgcgtgacatcgtcgctaagcaaaacgatgaagttgcctcgaaaattaaagagatcatggagaaaggtgaactcgttccagatgaactgaataatgcggtagtaaaacgccgcctgtcggagaaagactgcgaaaaaggctttattttggatggtttcccgcgtaccgtgcgccaagcggaatatctggatagttttcttgaaagccagaatcgccagttgacagccgccgtgctgttcaaagtccccgaagatgaagttgttcagcgtctgctgtctcgcctgatctgtccgaaatgcgggcgtatctacaacatgatttttctgccaccaaaagaagacgagctgtgtgacgattgcggtgtcggcttagtacagcgtgatgatgataaggaagaaacggtccgtcaccgcctgaaagtctaccttgagaagacccagccggtcattgactattatagtaagaaaggtattctcaaacgcgtagatgggtcgcaaggaatcgacaacgttgtggcagaagtcctggggattctgggttggagcgataag

SEQ ID NO: 1260 - protein, 231 aa, synthetic construct
  REGION 1..231: note = Variant of adenylate kinase
MHHHHHHGGSGMGAYLVFLGPPGAGKGTQGRRISAKTGIPHISTGDILRDIVAKQNDEVASKIKEIMEKGELVPDELNNAVVKRRLSEKDCEKGFILDGFPRTVRQAEYLDSFLESQNRQLTAAVLFKVPEDEVVQRLLSRLICPKCGRIYNMIFLPPKEDELCDDCGVGLVQRDDDKEETVRHRLKVYLEKTQPVIDYYSKKGILKRVDGSQGIDNVVAEVLGILGWSDK

SEQ ID NO: 1261 - DNA, 693 bp, synthetic construct
  misc_feature 1..693: note = Variant of adenylate kinase
  source 1..693: mol_type = other DNA
atgcaccatcatcaccatcacgggggctccggcatgggggcatatctggtgttcttaggtccgccgggcgcgggaaaaggtacccaaggccgtcgcatttcggcaaagactggcatcccgcatattagcacgggcgatatcctgcgtgacatcgtcgctaagcaaaacgatgaagttgcctcgaaaattaaagagatcatggagaaaggtgaactcgttccagatgaactgggtaatgcggtagtaaaatctcgcctgtcggagaaagactgcgaaaaaggctttattttggatggtttcccgcgtaccgtgcgccaagcggaatatctggatagttttcttgaaagccagaatcgccagttgacagccgccgtgctgttcaaagtccccgaagatgaagttgttcagcgtctgctgtctcgcctgatctgtccgaaatgcgggcgtatctacaacatgatttttctgccaccaaaagaagacgagctgtgtgacgattgcggtgtcggcttagtacagcgtgatgatgataaggaagaaacggtccgtcaccgcctgaaagtctaccttgagaagacccagccggtcattgactattatagtaagaaaggtattctcaaacgcgtagatgggtcgcaaggaatcgacaacgttgtggcagaagtcctggggattctgggttggagcgataag

SEQ ID NO: 1262 - protein, 231 aa, synthetic construct
  REGION 1..231: note = Variant of adenylate kinase
MHHHHHHGGSGMGAYLVFLGPPGAGKGTQGRRISAKTGIPHISTGDILRDIVAKQNDEVASKIKEIMEKGELVPDELGNAVVKSRLSEKDCEKGFILDGFPRTVRQAEYLDSFLESQNRQLTAAVLFKVPEDEVVQRLLSRLICPKCGRIYNMIFLPPKEDELCDDCGVGLVQRDDDKEETVRHRLKVYLEKTQPVIDYYSKKGILKRVDGSQGIDNVVAEVLGILGWSDK

SEQ ID NO: 1263 - DNA, 693 bp, synthetic construct
  misc_feature 1..693: note = Variant of adenylate kinase
  source 1..693: mol_type = other DNA
atgcaccatcatcaccatcacgggggctccggcatgggggcatatctggtgttcttaggtccgccgggcgcgggaaaaggtacccaaggccgtcgcatttcggcaaagactggcatcccgcatattagcacgggcgatatcctgcgtgacatcgtcgctaagcaaaacgatgaagttgcctcgttgattaaagagatcatggagaaaggtgaactcgttccagatgaactgggtaatgcggtagtaaaacgccgcctgtcggagaaagactgcgaaaaaggctttattttggatggtttcccgcgtaccgtgcgccaagcggaatatctggatagttttcttgaaagccagaatcgccagttgacagccgccgtgctgttcaaagtccccgaagatgaagttgttcagcgtctgctgtctcgcctgatctgtccgaaatgcgggcgtatctacaacatgatttttctgccaccaaaagaagacgagctgtgtgacgattgcggtgtcggcttagtacagcgtgatgatgataaggaagaaacggtccgtcaccgcctgaaagtctaccttgagaagacccagccggtcattgactattatagtaagaaaggtattctcaaacgcgtagatgggtcgcaaggaatcgacaacgttgtggcagaagtcctggggattctgggttggagcgataag

SEQ ID NO: 1264 - protein, 231 aa, synthetic construct
  REGION 1..231: note = Variant of adenylate kinase
MHHHHHHGGSGMGAYLVFLGPPGAGKGTQGRRISAKTGIPHISTGDILRDIVAKQNDEVASLIKEIMEKGELVPDELGNAVVKRRLSEKDCEKGFILDGFPRTVRQAEYLDSFLESQNRQLTAAVLFKVPEDEVVQRLLSRLICPKCGRIYNMIFLPPKEDELCDDCGVGLVQRDDDKEETVRHRLKVYLEKTQPVIDYYSKKGILKRVDGSQGIDNVVAEVLGILGWSDK

SEQ ID NO: 1265 - DNA, 693 bp, synthetic construct
  misc_feature 1..693: note = Variant of adenylate kinase
  source 1..693: mol_type = other DNA
atgcaccatcatcaccatcacgggggctccggcatgggggcatatctggtgttcttaggtccgccgggcgcgggaaaaggtacccaaggccgtcgcatttcggcaaagactggcatcccgcatattagcacgggcgatatcctgcgtgacatcgtcgctaagcaaaacgatgaagttgcctcgaaaattaaagagatcatggagaaaggtgaactcgttccagatgaactgggtaatgcggtagtaaaacgccgcctgtcggagaaagactgcgaaaaaggctttattttggatggtttcccgcgtaccgtgcgccaagcggaatatctggatagttttcttgaaagccagaatcgccagttgacagccgccgtgctgttcgaggtccccgaagatgaagttgttcagcgtctgctgtctcgcctgatctgtccgaaatgcgggcgtatctacaacatgatttttctgccaccaaaagaagacgagctgtgtgacgattgcggtgtcggcttagtacagcgtgatgatgataaggaagaaacggtccgtcaccgcctgaaagtctaccttgagaagacccagccggtcattgactattatagtaagaaaggtattctcaaacgcgtagatgggtcgcaaggaatcgacaacgttgtggcagaagtcctggggattctgggttggagcgataag

SEQ ID NO: 1266 - protein, 231 aa, synthetic construct
  REGION 1..231: note = Variant of adenylate kinase
MHHHHHHGGSGMGAYLVFLGPPGAGKGTQGRRISAKTGIPHISTGDILRDIVAKQNDEVASKIKEIMEKGELVPDELGNAVVKRRLSEKDCEKGFILDGFPRTVRQAEYLDSFLESQNRQLTAAVLFEVPEDEVVQRLLSRLICPKCGRIYNMIFLPPKEDELCDDCGVGLVQRDDDKEETVRHRLKVYLEKTQPVIDYYSKKGILKRVDGSQGIDNVVAEVLGILGWSDK

SEQ ID NO: 1267 - DNA, 693 bp, synthetic construct
  misc_feature 1..693: note = Variant of adenylate kinase
  source 1..693: mol_type = other DNA
atgcaccatcatcaccatcacgggggctccggcatgggggcatatctggtgttcttaggtccgccgggcgcgggaaaaggtacccaaggccgtcgcatttcggcaaagactggcatcccgcatattagcacgggcgatatcctgcgtgacatcgtcgctaagcaaaacgatgaagttgcctcgaaaattaaagagatcatggagaaaggtgaactcgttccagatgaactgggtaatgcggtagtaaaacgccgcctgtcggagaaagactgcgaaaaaggctttattttggatggtttcccgcgtaccgtgcgccaagcggaatatctggatagttttcttgaaagccagaatcgccagttgacagccgccgtgctgttcaaagtccccgaagatgaagttgttcagcgtctgctgtctcgcctgatctgtccgaaatgcgggcgtatctacaacatgatttttctgccaccaaaagaagacgagctgtgtgacgattgcggtgtcggcttagtacagcgtgatgatgataaggaagaaacggtccgtcaccgcctgaaagtctaccttgagaagacccagccggtcattgactattatagtaagaaaggtattctcaaacgcgtagatgggaatcaaggaatcgacaacgttgttgcagaagtcctggggattctgggttggagcgataag

SEQ ID NO: 1268 - protein, 231 aa, synthetic construct
  REGION 1..231: note = Variant of adenylate kinase
MHHHHHHGGSGMGAYLVFLGPPGAGKGTQGRRISAKTGIPHISTGDILRDIVAKQNDEVASKIKEIMEKGELVPDELGNAVVKRRLSEKDCEKGFILDGFPRTVRQAEYLDSFLESQNRQLTAAVLFKVPEDEVVQRLLSRLICPKCGRIYNMIFLPPKEDELCDDCGVGLVQRDDDKEETVRHRLKVYLEKTQPVIDYYSKKGILKRVDGNQGIDNVVAEVLGILGWSDK

SEQ ID NO: 1269 - DNA, 693 bp, synthetic construct
  misc_feature 1..693: note = Variant of adenylate kinase
  source 1..693: mol_type = other DNA
atgcaccatcatcaccatcacgggggctccggcatgggggcatatctggtgttcttaggtccgccgggcgcgggaaaaggtacccaaggccgtcgcatttcggcaaagactggcatcccgcatattagcacgggcgatatcctccgtgacatcgtcgctaagtctaacgatgaagttgcctcgaaaattaaagagatcatggagaaaggtgaactcgttccagatgaactgggtaatgcggtagtaaaacgccgcctgtcggagaaagactgcgaaaaaggctttattttggatggtttcccgcgtaccgtgcgccaagcggaatatctggatagttttcttgaaagccagaatcgccagttgacagccgccgtgctgttcaaagtccccgaagatgaagttgttcagcgtctgctgtctcgcctgatctgtccgaaatgcgggcgtatctacaacatgatttttctgccaccaaaagaagacgagctgtgtgacgattgcggtgtcggcttagtacagcgtgatgatgataaggaagaaacggtccgtcaccgcctgaaagtctaccttgagaagacccagccggtcattgactattatagtaagaaaggtattctcaaacgcgtagatgggtcgcaaggaatcgacaacgttgtggcagaagtcctggggattctgggttggagcgataag

SEQ ID NO: 1270 - protein, 231 aa, synthetic construct
  REGION 1..231: note = Variant of adenylate kinase
MHHHHHHGGSGMGAYLVFLGPPGAGKGTQGRRISAKTGIPHISTGDILRDIVAKSNDEVASKIKEIMEKGELVPDELGNAVVKRRLSEKDCEKGFILDGFPRTVRQAEYLDSFLESQNRQLTAAVLFKVPEDEVVQRLLSRLICPKCGRIYNMIFLPPKEDELCDDCGVGLVQRDDDKEETVRHRLKVYLEKTQPVIDYYSKKGILKRVDGSQGIDNVVAEVLGILGWSDK

SEQ ID NO: 1271 - DNA, 693 bp, synthetic construct
  misc_feature 1..693: note = Variant of adenylate kinase
  source 1..693: mol_type = other DNA
atgcaccatcatcaccatcacgggggctccggcatgggggcatatctggtgttcttaggtccgccgggcgcgggaaaaggtacccaaggccgtcgcatttcggcaaagactggcatcccgcatattagcacgggcgatatcctgcgtgacatcgtcgctaagcaaaacgatgaagttgcctcgaaaattaaagagatcatggagaaaggtgaactcgttccagatgaactgggtaatgcggtagtaaaacgccgcctgtcggagaaagactgcgaaaaaggctttattttggatggtttcccgcgtaccgtgcgccaagcggaatatctggatagttttcttgaaagccagaatcgccagttgacagccgccgtgctgattaaagtccccgaagatgaagttgttcagcgtctgctgtctcgcctgatctgtccgaaatgcgggcgtatctacaacatgatttttctgccaccaaaagaagacgagctgtgtgacgattgcggtgtcggcttagtacagcgtgatgatgataaggaagaaacggtccgtcaccgcctgaaagtctaccttgagaagacccagccggtcattgactattatagtaagaaaggtattctcaaacgcgtagatgggtcgcaaggaatcgacaacgttgtggcagaagtcctggggattctgggttggagcgataag

SEQ ID NO: 1272 - protein, 231 aa, synthetic construct
  REGION 1..231: note = Variant of adenylate kinase
MHHHHHHGGSGMGAYLVFLGPPGAGKGTQGRRISAKTGIPHISTGDILRDIVAKQNDEVASKIKEIMEKGELVPDELGNAVVKRRLSEKDCEKGFILDGFPRTVRQAEYLDSFLESQNRQLTAAVLIKVPEDEVVQRLLSRLICPKCGRIYNMIFLPPKEDELCDDCGVGLVQRDDDKEETVRHRLKVYLEKTQPVIDYYSKKGILKRVDGSQGIDNVVAEVLGILGWSDK

SEQ ID NO: 1273 - DNA, 693 bp, synthetic construct
  misc_feature 1..693: note = Variant of adenylate kinase
  source 1..693: mol_type = other DNA
atgcaccatcatcaccatcacgggggctccggcatgggggcatatctggtgttcttaggttctccgggcgcgggaaaaggtacccaaggccgtcgcatttcggcaaagactggcatcccgcatattagcacgggcgatatcctgcgtgacatcgtcgctaagcaaaacgatgaagttgcctcgaaaattaaagagatcatggagaaaggtgaactcgttccagatgaactgggtaatgcggtagtaaaacgccgcctgtcggagaaagactgcgaaaaaggctttattttggatggtttcccgcgtaccgtgcgccaagcggaatatctggatagttttcttgaaagccagaatcgccagttgacagccgccgtgctgttcaaagtccccgaagatgaagttgttcagcgtctgctgtctcgcctgatctgtccgaaatgcgggcgtatctacaacatgatttttctgccaccaaaagaagacgagctgtgtgacgattgcggtgtcggcttagtacagcgtgatgatgataaggaagaaacggtccgtcaccgcctgaaagtctaccttgagaagacccagccggtcattgactattatagtaagaaaggtattctcaaacgcgtagatgggtcgcaaggaatcgacaacgttgtggcagaagtcctggggattctgggttggagcgataag

SEQ ID NO: 1274 - protein, 231 aa, synthetic construct
  REGION 1..231: note = Variant of adenylate kinase
MHHHHHHGGSGMGAYLVFLGSPGAGKGTQGRRISAKTGIPHISTGDILRDIVAKQNDEVASKIKEIMEKGELVPDELGNAVVKRRLSEKDCEKGFILDGFPRTVRQAEYLDSFLESQNRQLTAAVLFKVPEDEVVQRLLSRLICPKCGRIYNMIFLPPKEDELCDDCGVGLVQRDDDKEETVRHRLKVYLEKTQPVIDYYSKKGILKRVDGSQGIDNVVAEVLGILGWSDK

SEQ ID NO: 1275 - DNA, 693 bp, synthetic construct
  misc_feature 1..693: note = Variant of adenylate kinase
  source 1..693: mol_type = other DNA
atgcaccatcatcaccatcacgggggctccggcatgggggcatatctggtgttcttaggtccgccgggcgcgggaaaaggtacccaaggccgtattatttcggcaaagactggcatcccgcatattagcacgggcgatatcctgcgtgacatcgtcgctaagcaaaacgatgaagttgcctcgaaaattaaagagatcatggagaaaggtgaactcgttccagatgaactgggtaatgcggtagtaaaacgccgcctgtcggagaaagactgcgaaaaaggctttattttggatggtttcccgcgtaccgtgcgccaagcggaatatctggatagttttcttgaaagccagaatcgccagttgacagccgccgtgctgttcaaagtccccgaagatgaagttgttcagcgtctgctgtctcgcctgatctgtccgaaatgcgggcgtatctacaacatgatttttctgccaccaaaagaagacgagctgtgtgacgattgcggtgtcggcttagtacagcgtgatgatgataaggaagaaacggtccgtcaccgcctgaaagtctaccttgagaagacccagccggtcattgactattatagtaagaaaggtattctcaaacgcgtagatgggtcgcaaggaatcgacaacgttgtggcagaagtcctggggattctgggttggagcgataag

SEQ ID NO: 1276 - protein, 231 aa, synthetic construct
  REGION 1..231: note = Variant of adenylate kinase
MHHHHHHGGSGMGAYLVFLGPPGAGKGTQGRIISAKTGIPHISTGDILRDIVAKQNDEVASKIKEIMEKGELVPDELGNAVVKRRLSEKDCEKGFILDGFPRTVRQAEYLDSFLESQNRQLTAAVLFKVPEDEVVQRLLSRLICPKCGRIYNMIFLPPKEDELCDDCGVGLVQRDDDKEETVRHRLKVYLEKTQPVIDYYSKKGILKRVDGSQGIDNVVAEVLGILGWSDK

SEQ ID NO: 1277 - DNA, 693 bp, synthetic construct
  misc_feature 1..693: note = Variant of adenylate kinase
  source 1..693: mol_type = other DNA
atgcaccatcatcaccatcacgggggctccggcatgggggcatatctggtgttcttaggtccgccgggcgcgggaaaaggtacccaaggccgtcgcatttcggcaaagactggcatcccgcatattagcacgggcgatatcctgcgtgacatcgtcgctaagcaaaacgatgaagttgcctcgaaaattaaagagatcatggagaaaggtgaactcgttccagatgaactgggtaatggggtagtaaaacgccgcctgtcggagaaagactgcgaaaaaggctttattttggatggtttcccgcgtaccgtgcgccaagcggaatatctggatagttttcttgaaagccagaatcgccagttgacagccgccgtgctgttcaaagtccccgaagatgaagttgttcagcgtctgctgtctcgcctgatctgtccgaaatgcgggcgtatctacaacatgatttttctgccaccaaaagaagacgagctgtgtgacgattgcggtgtcggcttagtacagcgtgatgatgataaggaagaaacggtccgtcaccgcctgaaagtctaccttgagaagacccagccggtcattgactattatagtaagaaaggtattctcaaacgcgtagatgggtcgcaaggaatcgacaacgttgtggcagaagtcctggggattctgggttggagcgataag

SEQ ID NO: 1278 - protein, 231 aa, synthetic construct
  REGION 1..231: note = Variant of adenylate kinase
MHHHHHHGGSGMGAYLVFLGPPGAGKGTQGRRISAKTGIPHISTGDILRDIVAKQNDEVASKIKEIMEKGELVPDELGNGVVKRRLSEKDCEKGFILDGFPRTVRQAEYLDSFLESQNRQLTAAVLFKVPEDEVVQRLLSRLICPKCGRIYNMIFLPPKEDELCDDCGVGLVQRDDDKEETVRHRLKVYLEKTQPVIDYYSKKGILKRVDGSQGIDNVVAEVLGILGWSDK

SEQ ID NO: 1279 - DNA, 693 bp, synthetic construct
  misc_feature 1..693: note = Variant of adenylate kinase
  source 1..693: mol_type = other DNA
atgcaccatcatcaccatcacgggggctccggcatgggggcatatctggtgttcttaggtccgccgggcgcgggaaaaggtacccaaggccgtcgcatttcggcaaagactggcatcccgcatattagcacgggcgatatcctgcgtgacatcgtcgctaagcaaaacgatgaagttgcctcgaaaattaaagagatcatggagaaaggtgaactcgttccagatgaactgggtaatgcggtagtaaaagagcgcctgtcggagaaagactgcgaaaaaggctttattttggatggtttcccgcgtaccgtgcgccaagcggaatatctggatagttttcttgaaagccagaatcgccagttgacagccgccgtgctgttcaaagtccccgaagatgaagttgttcagcgtctgctgtctcgcctgatctgtccgaaatgcgggcgtatctacaacatgatttttctgccaccaaaagaagacgagctgtgtgacgattgcggtgtcggcttagtacagcgtgatgatgataaggaagaaacggtccgtcaccgcctgaaagtctaccttgagaagacccagccggtcattgactattatagtaagaaaggtattctcaaacgcgtagatgggtcgcaaggaatcgacaacgttgtggcagaagtcctggggattctgggttggagcgataag

SEQ ID NO: 1280 - protein, 231 aa, synthetic construct
  REGION 1..231: note = Variant of adenylate kinase
MHHHHHHGGSGMGAYLVFLGPPGAGKGTQGRRISAKTGIPHISTGDILRDIVAKQNDEVASKIKEIMEKGELVPDELGNAVVKERLSEKDCEKGFILDGFPRTVRQAEYLDSFLESQNRQLTAAVLFKVPEDEVVQRLLSRLICPKCGRIYNMIFLPPKEDELCDDCGVGLVQRDDDKEETVRHRLKVYLEKTQPVIDYYSKKGILKRVDGSQGIDNVVAEVLGILGWSDK

SEQ ID NO: 1281 - DNA, 693 bp, synthetic construct
  misc_feature 1..693: note = Variant of adenylate kinase
  source 1..693: mol_type = other DNA
atgcaccatcatcaccatcacgggggctccggcatgggggcatatctggtgttcttaggtccgccgggcgcgggaaaaggtacccaaggccgtcgcatttcggcaaagactggcatcccgcatattagcacgggcgatatcctgcgtgacatcgtcgctaagcaaaacgatgaagttgcctcgaaaattaaagagatcatggagaaaggtgaactcgttccagatgaactgggtaatgcggtagtaaaacgccgcctgtcggagaaagactgcgaaaaaggctttattttggatggtttcccgcgtaccgtgcgccaagcggaatatctggatagttttcttgaaagccagaatcgccagttgacagccgccgtgctgttcaaagtccccgaagatgaagttgttcagcgtctgctgtctcgcctgatctgtccgaaatgcgggcgtatctacaacatgatttttctgccaccaaaagaagacgagctgtgtgacgattgcggtgtcggcttagtacagcgtgatgatgataaggaagaaacggtccgtcaccgcctgaaagtctaccttgagaagacccagccggtcattgactattatagtaagaaaggtattctcaaacgcgtagatgggtcgcaaggaatcgacaacgttgttgtggaagtcctggggattctgggttggagcgataag

SEQ ID NO: 1282 - protein, 231 aa, synthetic construct
  REGION 1..231: note = Variant of adenylate kinase
MHHHHHHGGSGMGAYLVFLGPPGAGKGTQGRRISAKTGIPHISTGDILRDIVAKQNDEVASKIKEIMEKGELVPDELGNAVVKRRLSEKDCEKGFILDGFPRTVRQAEYLDSFLESQNRQLTAAVLFKVPEDEVVQRLLSRLICPKCGRIYNMIFLPPKEDELCDDCGVGLVQRDDDKEETVRHRLKVYLEKTQPVIDYYSKKGILKRVDGSQGIDNVVVEVLGILGWSDK

SEQ ID NO: 1283 - DNA, 693 bp, synthetic construct
  misc_feature 1..693: note = Variant of adenylate kinase
  source 1..693: mol_type = other DNA
atgcaccatcatcaccatcacgggggctccggcatgggggcatatctggtgttcttaggtcctccgggcgcgggaaaaggtacccaaggccgtcgcatttcggcaaagactggcatcccgcatattagcacgggcgatatcctgcgtgacatcgtcgctaaacagaacgatgaagttgcctcgagcattaaagagatcatggagaaaggtgaactcgttccagatgaactgaccaatgcggtagtaaaacgccgcctgtcggagaaagactgcgaaaaaggctttattttggatggtttcccgcgtaccgtgcgccaagcggaatatctggatagttttcttgaaagccagaatcgccagttgacagccgccgtgctgttcaaagtccccgaagatgaagttgttcagcgtctgctgtctcgcctgatctgtccgaaatgcgggcgtatctacaacatgatttttctgccaccaaaagaagacgagctgtgtgacgattgcggtgtcggcttagtacagcgtgatgatgataagccggaaacggtccgtcaccgcctgaaagtctaccttgagaagacccagccggtcattgactattatagtaagaaaggtattctcaaacgcgtagatgggtcgcaaggaatcgacaacgttgtggcagaagtcctggggattctgggttggagcgataag

SEQ ID NO: 1284 - protein, 231 aa, synthetic construct
  REGION 1..231: note = Variant of adenylate kinase
MHHHHHHGGSGMGAYLVFLGPPGAGKGTQGRRISAKTGIPHISTGDILRDIVAKQNDEVASSIKEIMEKGELVPDELTNAVVKRRLSEKDCEKGFILDGFPRTVRQAEYLDSFLESQNRQLTAAVLFKVPEDEVVQRLLSRLICPKCGRIYNMIFLPPKEDELCDDCGVGLVQRDDDKPETVRHRLKVYLEKTQPVIDYYSKKGILKRVDGSQGIDNVVAEVLGILGWSDK

SEQ ID NO: 1285 - DNA, 693 bp, synthetic construct
  misc_feature 1..693: note = Variant of adenylate kinase
  source 1..693: mol_type = other DNA
atgcaccatcatcaccatcacgggggctccggcatgggggcatatctggtgttcttaggtccgccgggcgcgggaaaaggtacccaaggccgtcgcatttcggcaaagactggcatcccgcatattagcacgggcgatatcctgcgtgacatcgtcgctaagcaaaacgatgaagttgcctcgaaaattaaagagatcatggagaaaggtgaactcgttccagatgaactgggtaatgcggtagtaaaacgccgcctgtcggagaaagactgcgaaaaaggctttattttggatggtttcccgcgtaccgtgcgccaagcggaatatctggatagttttcttgaaagccagaatcgccagttgacagccgccgtgctgttcaaagtccccgaagatgaagttgttcagcgtctgctgtctcgcctgatctgtccgaaatgcgggcgtatctacaacatgatttttctgccaccaaaagaagacgagctgtgtgacgattgcggtgtcggcttagtacagcgtgatgatgataaggaagaaacggtccgtcaccgcctgaaagtctacgaggagaagacccagccggtcattgactattatagtaagaaaggtattctcaaacgcgtagatgggtcgcaaggaatcgacaacgttgtggcagaagtcctggggattctgggttggagcgataag

SEQ ID NO: 1286 - protein, 231 aa, synthetic construct
  REGION 1..231: note = Variant of adenylate kinase
MHHHHHHGGSGMGAYLVFLGPPGAGKGTQGRRISAKTGIPHISTGDILRDIVAKQNDEVASKIKEIMEKGELVPDELGNAVVKRRLSEKDCEKGFILDGFPRTVRQAEYLDSFLESQNRQLTAAVLFKVPEDEVVQRLLSRLICPKCGRIYNMIFLPPKEDELCDDCGVGLVQRDDDKEETVRHRLKVYEEKTQPVIDYYSKKGILKRVDGSQGIDNVVAEVLGILGWSDK

SEQ ID NO: 1287 - DNA, 693 bp, synthetic construct
  misc_feature 1..693: note = Variant of adenylate kinase
  source 1..693: mol_type = other DNA
atgcaccatcatcaccatcacgggggctccggcatgggggcatatctggtgttcttaggtcctccgggcgcgggaaaaggtacccaaggccgtcgcatttcggcaaagactggcatcccgcatattagcacgggcgatatcctgcgtgacatcgtcgctaaaagcaacgatgaagttgcctcggaaattaaagagatcatggagaaaggtgaactcgttccagatgaactgggtaatgcggtagtaaaagcgcgcctgtcggagaaagactgcgaaaaaggctttattttggatggtttcccgcgtaccgtgcgccaagcggaatatctggatagttttcttgaaagccagaatcgccagttgacagccgccgtgctgttcaaagtccccgaagatgaagttgttcagcgtctgctgtctcgcctgatctgtccgaaatgcgggcgtatctacaacatgatttttctgccaccaaaagaagacgagctgtgtgacgattgcggtgtcggcttagtacagcgtgatgatgataaggaagaaacggtccgtcaccgcctgaaagtctaccttgagaagacccagccggtcattgactattatagtaagaaaggtattctcaaacgcgtagatgggtcgcaaggaatcgacaacgttgtggcagaagtcctggggattctgggttggagcgataag

SEQ ID NO: 1288 - protein, 231 aa, synthetic construct
  REGION 1..231: note = Variant of adenylate kinase
MHHHHHHGGSGMGAYLVFLGPPGAGKGTQGRRISAKTGIPHISTGDILRDIVAKSNDEVASEIKEIMEKGELVPDELGNAVVKARLSEKDCEKGFILDGFPRTVRQAEYLDSFLESQNRQLTAAVLFKVPEDEVVQRLLSRLICPKCGRIYNMIFLPPKEDELCDDCGVGLVQRDDDKEETVRHRLKVYLEKTQPVIDYYSKKGILKRVDGSQGIDNVVAEVLGILGWSDK

SEQ ID NO: 1289 - DNA, 693 bp, synthetic construct
  misc_feature 1..693: note = Variant of adenylate kinase
  source 1..693: mol_type = other DNA
atgcaccatcatcaccatcacgggggctccggcatgggggcatatctggtgttcttaggtcgtccgggcgcgggaaaaggtacccaaggccgtcgcatttcggcaaagactggcatcccgcatattagcacgggcgatatcctgcgtgacatcgtcgctaaaagcaacgatgaagttgcctcgaaaattaaagagatcatggagaaaggtgaactcgttccagatgaactgggtaatgcggtagtaaaacgccgcctgtcggagaaagactgcgaaaaaggctttattttggatggtttcccgcgtaccgtgcgccaagcggaatatctggatagttttcttgaaagccagaatcgccagttgacagccgccgtgctgttcaaagtccccgaagatgaagttgttcagcgtctgctgtctcgcctgatctgtccgaaatgcgggcgtatctacaacatgatttttctgccaccaaaagaagacgagctgtgtgacgattgcggtgtcggcttagtacagcgtgatgatgataaggaagaaacggtccgtcaccgcctgaaagtctaccatgagaagacccagccggtcattgactattatagtaagaaaggtattctcaaacgcgtagatgggaaccaaggaatcgacaacgttgtggcagaagtcctggggattctgggttggagcgataag

SEQ ID NO: 1290 - protein, 231 aa, synthetic construct
  REGION 1..231: note = Variant of adenylate kinase
MHHHHHHGGSGMGAYLVFLGRPGAGKGTQGRRISAKTGIPHISTGDILRDIVAKSNDEVASKIKEIMEKGELVPDELGNAVVKRRLSEKDCEKGFILDGFPRTVRQAEYLDSFLESQNRQLTAAVLFKVPEDEVVQRLLSRLICPKCGRIYNMIFLPPKEDELCDDCGVGLVQRDDDKEETVRHRLKVYHEKTQPVIDYYSKKGILKRVDGNQGIDNVVAEVLGILGWSDK

SEQ ID NO: 1291 - DNA, 693 bp, synthetic construct
  misc_feature 1..693: note = Variant of adenylate kinase
  source 1..693: mol_type = other DNA
atgcaccatcatcaccatcacgggggctccggcatgggggcatatctggtgttcttaggtccgccgggcgcgggaaaaggtacccaaggccgtattatttcggcaaagactggcatcccgcatattagcacgggcgatatcctgcgtgacatcgtcgctaagcaaaacgatgaagttgcctcgaaaattaaagagatcatggagaaaggtgaactcgttccagatgaactgggtaatgcggtggtaaaacgccgcctgtcggagaaagactgcgaaaaaggctttattttggatggtttcccgcgtaccgtgcgccaagcggaatatctggatagttttcttgaaagccagaatcgccagttgacagccgccgtgctgattaacgtccccgaagatgaagttgttcagcgtctgctgtctcgcctgatctgtccgaaatgcgggcgtatctacaacatgatttttctgccaccaaaagaagacgagctgtgtgacgattgcggtgtcggcttagtacagcgtgatgatgataaggaagaaacggtccgtcaccgcctgaaagtctaccttgagaagacccagccggtcattgactattatagtaagaaaggtattctcaaacgcgtagatgggtcgcaaggaatcgacaacgttgtggcagaagtcctgggggcgctgggttggagcgataag

SEQ ID NO: 1292 - protein, 231 aa, synthetic construct
  REGION 1..231: note = Variant of adenylate kinase
MHHHHHHGGSGMGAYLVFLGPPGAGKGTQGRIISAKTGIPHISTGDILRDIVAKQNDEVASKIKEIMEKGELVPDELGNAVVKRRLSEKDCEKGFILDGFPRTVRQAEYLDSFLESQNRQLTAAVLINVPEDEVVQRLLSRLICPKCGRIYNMIFLPPKEDELCDDCGVGLVQRDDDKEETVRHRLKVYLEKTQPVIDYYSKKGILKRVDGSQGIDNVVAEVLGALGWSDK

SEQ ID NO: 1293 - DNA, 693 bp, synthetic construct
  misc_feature 1..693: note = Variant of adenylate kinase
  source 1..693: mol_type = other DNA
atgcaccatcatcaccatcacgggggctccggcatgggggcatatctggtgttcttaggtcgtccgggcgcgggaaaaggtacccaaggccgtcgcatttcggcaaagactggcatcccgcatattagcacgggcgatatcctgcgtgacatcgtcgctacaagcaacgatgaagttgcctcgaaaattaaagagatcatggagaaaggtgaactcgttccagatgaactgggtaatgcggtagtaaaagcgcgcctgtcggagaaagactgcgaaaaaggctttattttggatggtttcccgcgtaccgtgcgccaagcggaatatctggatagttttcttgaaagccagaatcgccagttgacagccgccgtgctgttcaaagtccccgaagatgaagttgttcagcgtctgctgtctcgcctgatctgtccgaaatgcgggcgtatctacaacatgatttttctgccaccaaaagaagacgagctgtgtgacgattgcggtgtcggcttagtacagcgtgatgatgataagccggaaacggtccgtcaccgcctgaaagtctaccttgagaagacccagccggtcattgactattatagtaagaaaggtattctcaaacgcgtagatgggtcgcaaggaatcgacaacgttgtggcagaagtcctggggattctgggttggagcgataag

SEQ ID NO: 1294 - protein, 231 aa, synthetic construct
  REGION 1..231: note = Variant of adenylate kinase
MHHHHHHGGSGMGAYLVFLGRPGAGKGTQGRRISAKTGIPHISTGDILRDIVATSNDEVASKIKEIMEKGELVPDELGNAVVKARLSEKDCEKGFILDGFPRTVRQAEYLDSFLESQNRQLTAAVLFKVPEDEVVQRLLSRLICPKCGRIYNMIFLPPKEDELCDDCGVGLVQRDDDKPETVRHRLKVYLEKTQPVIDYYSKKGILKRVDGSQGIDNVVAEVLGILGWSDK

SEQ ID NO: 1295 - DNA, 693 bp, synthetic construct
  misc_feature 1..693: note = Variant of adenylate kinase
  source 1..693: mol_type = other DNA
atgcaccatcatcaccatcacgggggctccggcatgggggcatatctggtgttcttaggtcgtccgggcgcgggaaaaggtacccaaggccgtcgcatttcggcaaagactggcatcccgcatattagcacgggcgatatcctgcgtgacatcgtcgctaaacagaacgatgaagttgcctcgaaaattaaagagatcatggagaaaggtgaactcgttccagatgaactgggtaatgcggtagtaaaacgccgcctgtcggagaaagactgcgaaaaaggctttattttggatggtttcccgcgtaccgtgcgccaagcggaatatctggatagttttcttgaaagccagaatcgccagttgacagccgccgtgctgttcaaagtccccgaagatgaagttgttcagcgtctgctgtctcgcctgatctgtccgaaatgcgggcgtatctacaacatgatttttctgccaccaaaagaagacgagctgtgtgacgattgcggtgtcggcttagtacagcgtgatgatgataaggaagaaacggtccgtcaccgcctgaaagtctaccgtgagaagacccagccggtcattgactattatagtaagaaaggtattctcaaacgcgtagatgggagccaaggaatcgacaacgttgtggcagaagtcctggggattctgggttggagcgataag

SEQ ID NO: 1296 - protein, 231 aa, synthetic construct
  REGION 1..231: note = Variant of adenylate kinase
MHHHHHHGGSGMGAYLVFLGRPGAGKGTQGRRISAKTGIPHISTGDILRDIVAKQNDEVASKIKEIMEKGELVPDELGNAVVKRRLSEKDCEKGFILDGFPRTVRQAEYLDSFLESQNRQLTAAVLFKVPEDEVVQRLLSRLICPKCGRIYNMIFLPPKEDELCDDCGVGLVQRDDDKEETVRHRLKVYREKTQPVIDYYSKKGILKRVDGSQGIDNVVAEVLGILGWSDK

SEQ ID NO: 1297 - DNA, 693 bp, synthetic construct
  misc_feature 1..693: note = Variant of adenylate kinase
  source 1..693: mol_type = other DNA
atgcaccatcatcaccatcacgggggctccggcatgggggcatatctggtgttcttaggtccgccgggcgcgggaaaaggtacccaaggccgtattatttcggcaaagacaggcatcccgcatattagcacgggcgatatcctgcgtgacatcgtcgctaagcaaaacgatgaagtttcgtcgaaaattaaagagatcatggagaaaggtgaactcgttccagatgaactgggtaatgcgctggtaagccgccgcctgtcggagaaagactgcgaaaaaggctttattttggatggtttcccgcgtaccgtgcgccaagcggaatatctggatagttttcttgaaagccagaatcgccagttgacagccgccgtgctgtttaacgtccccgaagatgaagttatgcagcgtctgctgtctcgcctgatctgtccgaaatgcgggcgtatctacaacatgatttttctgccaccaaaagaagacgagctgtgtgacgattgcggtgtcggcttagtacagcgtgatgatgataaggaagaaacggtccgtcaccgcctgaaagtctaccttgagaagacccagccggtcattgactattatagtaagaaaggtattctcaaacgcgtagatgggtcgcaaggaatcgacaacgttgtggcagaagtcctggggattctgggttggagcgataag

SEQ ID NO: 1298 - protein, 231 aa, synthetic construct
  REGION 1..231: note = Variant of adenylate kinase
MHHHHHHGGSGMGAYLVFLGPPGAGKGTQGRIISAKTGIPHISTGDILRDIVAKQNDEVSSKIKEIMEKGELVPDELGNALVSRRLSEKDCEKGFILDGFPRTVRQAEYLDSFLESQNRQLTAAVLFNVPEDEVMQRLLSRLICPKCGRIYNMIFLPPKEDELCDDCGVGLVQRDDDKEETVRHRLKVYLEKTQPVIDYYSKKGILKRVDGSQGIDNVVAEVLGILGWSDK

SEQ ID NO: 1299 - DNA, 693 bp, synthetic construct
  misc_feature 1..693: note = Variant of adenylate kinase
  source 1..693: mol_type = other DNA
atgcaccatcatcaccatcacgggggctccggcatgggggcatatctggtgttcttaggtccgccgggcgcgggaaaaggtacccaaggccgtcgcatttcggcaaagactggcatcccgcatattagcacgggcgatatcctgcgtgacatcgtcgctaagcaaaacgatgaagttgcctcgaaaattaaagagatcatggagaaaggtgaactcgttccagatgaactgggtaatgcggtagtaaaacgccgcctgtcggagaaagactgcgaaaaaggctttattttggatggtttcccgcgtaccgtgcgccaagcggaatatctggatagttttcttgaaagccagaatcgccagttgacagccgccgtgctgattaacgtccccgaagatgaagttgttcagcgtctgctgtctcgcctgatctgtccgaaatgcgggcgtatctacaacatgatttttctgccaccaaaagaagacgagctgtgtgacgattgcggtgtcggcttagtacagcgtgatgatgataaggaagaaacggtccgtcaccgcctgaaagtctaccttgagaagacccagccggtcattgactattatagtaagaaaggtattctcaaacgcgtagatgggtcgcaaggaatcgacaacgttgtggcagaagtcctggggattctgggttggagcgataag

SEQ ID NO: 1300 - protein, 231 aa, synthetic construct
  REGION 1..231: note = Variant of adenylate kinase
MHHHHHHGGSGMGAYLVFLGPPGAGKGTQGRRISAKTGIPHISTGDILRDIVAKQNDEVASKIKEIMEKGELVPDELGNAVVKRRLSEKDCEKGFILDGFPRTVRQAEYLDSFLESQNRQLTAAVLINVPEDEVVQRLLSRLICPKCGRIYNMIFLPPKEDELCDDCGVGLVQRDDDKEETVRHRLKVYLEKTQPVIDYYSKKGILKRVDGSQGIDNVVAEVLGILGWSDK

SEQ ID NO: 1301 - DNA, 693 bp, synthetic construct
  misc_feature 1..693: note = Variant of adenylate kinase
  source 1..693: mol_type = other DNA
atgcaccatcatcaccatcacgggggctccggcatgggggcatatctggtgttcttaggtcgtccgggcgcgggaaaaggtacccaaggccgtcgcatttcggcaaagactggcatcccgcatattagcacgggcgatatcctgcgtgacatcgtcgctaaaagcaacgatgaagttgcctcgaaaattaaagagatcatggagaaaggtgaactcgttccagatgaactgggtaatgcggtagtaaaacgccgcctgtcggagaaagactgcgaaaaaggctttattttggatggtttcccgcgtaccgtgcgccaagcggaatatctggatagttttcttgaaagccagaatcgccagttgacagccgccgtgctgttcaaagtccccgaagatgaagttgttcagcgtctgctgtctcgcctgatctgtccgaaatgcgggcgtatctacaacatgatttttctgccaccaaaagaagacgagctgtgtgacgattgcggtgtcggcttagtacagcgtgatgatgataagccggaaacggtccgtcaccgcctgaaagtctaccttgagaagacccagccggtcattgactattatagtaagaaaggtattctcaaacgcgtagatgggagccaaggaatcgacaacgttgtggcagaagtcctggggattctgggttggagcgataag

SEQ ID NO: 1302 - protein, 231 aa, synthetic construct
  REGION 1..231: note = Variant of adenylate kinase
MHHHHHHGGSGMGAYLVFLGRPGAGKGTQGRRISAKTGIPHISTGDILRDIVAKSNDEVASKIKEIMEKGELVPDELGNAVVKRRLSEKDCEKGFILDGFPRTVRQAEYLDSFLESQNRQLTAAVLFKVPEDEVVQRLLSRLICPKCGRIYNMIFLPPKEDELCDDCGVGLVQRDDDKPETVRHRLKVYLEKTQPVIDYYSKKGILKRVDGSQGIDNVVAEVLGILGWSDK

SEQ ID NO: 1303 - DNA, 969 bp, synthetic construct
  misc_feature 1..969: note = Variant of adenosine kinase
  source 1..969: mol_type = other DNA
atgcaccatcatcaccatcacgggggctccggcatgagtgcactgatttgcggttctttagcgtatgataccatcatggtgtttccggaccagttcaagaatcatattctgcccgataaagttcacatcctcaatgtcagctttcttgtaccacgcctgcgccgtgaatttggaggctgtgccggcaacattgcgtacaatctgcatctgttgggtggtgctccgatccctatgggaacggtgggccaagatttcggtccgtatcgcgagcacttcgaaactctgggcattgacttatcccgcgtcaagatcatcgatgatctgtttacagcgcaggccttcattacgaccgaccatgatcataaccagattacggcgtttcatccaggggcaatgatgcgttcgtacgaaaatcacgttcgtgatgtgccgggtgttaccttgggcctcgtaggtcctgatggccgcgagggtatgatccaaaatgccgaagaatttgctgctggtggcattccgttcatttttgacccaggtcaggcactgccgctgttcaacggccccgaactgcgcgagtttatcgaacaggcggactatgtggtggtcaacgattacgaaagcaatctgcttcaaacgcgtactggctggaacgagcaggacattgtttcacgcgtgcaggcgtatatcaccacgcaaggttcgaaaggagccctggtacatacaccggagaagacctacgatattcgtccggcacacgaacgtcgtgtcgttgatccaactggttgcggcgacgcgtttcgcgccggcctgatctatggtattcagcataattatgattggttgaccattggccgcatgggaaacttaatgggtgcgctgaaagtggaacaccctggcacgcaaaatcagcgtttcgattttgccctgttcaacgaccagttcaaacaaagctttggctactcgctctaatga

SEQ ID NO: 1304 - protein, 321 aa, synthetic construct
  REGION 1..321: note = Variant of adenosine kinase
MHHHHHHGGSGMSALICGSLAYDTIMVFPDQFKNHILPDKVHILNVSFLVPRLRREFGGCAGNIAYNLHLLGGAPIPMGTVGQDFGPYREHFETLGIDLSRVKIIDDLFTAQAFITTDHDHNQITAFHPGAMMRSYENHVRDVPGVTLGLVGPDGREGMIQNAEEFAAGGIPFIFDPGQALPLFNGPELREFIEQADYVVVNDYESNLLQTRTGWNEQDIVSRVQAYITTQGSKGALVHTPEKTYDIRPAHERRVVDPTGCGDAFRAGLIYGIQHNYDWLTIGRMGNLMGALKVEHPGTQNQRFDFALFNDQFKQSFGYSL

SEQ ID NO: 1305 - DNA, 969 bp, synthetic construct
  misc_feature 1..969: note = Variant of adenosine kinase
  source 1..969: mol_type = other DNA
atgcaccatcatcaccatcacgggggctccggcatgagtgcactgatttgcggttctttagcgtatgataccatcatggtgtttccggaccaattcaagaatcatattctgcccgataaagttcacattctcaatgtcagctttcttgtaccacgcctgcgccgtgaatttggaggctgtgccggcaacattgcgtacaatctgcatctgttgggtggtgctccgatccctatgggaacggtgggccaagatttccagccgtatcgcgaacacttcgaaactctgggcattgacttatcccgcgtcaagatcatcgatgatctgtttacagcgcaggccttcattacgaccgaccatgatcataaccagattacggcgtttcatccaggggcaatgatgcgttcgtacgaaaatcacgttcgtgatgtgccgggtgttaccttgggcctcgtaggtcctgatggccgcgagggtatgatccaaaatgccgaagaatttgctgctgcgggcattccgttcatttttgacccaggtcaggcactgccgctgttcaacggccccgaactgcgcgagtttatcgaacaggcggactatgtggtggtcaacgattacgaaagcaatctgcttcaaacgcgtactggctggaacgagcaggacattgtttcacgcgtgcaggcgtatatcaccacgcaaggttcgaaaggagccctggtacatacaccggagaagacctacgatattcgtccggcacacgaacgtcgtgtcgttgatccaactggttgcggcgacgcgtttcgcgccggcctgatctatggtattcagcataattatgattggttgaccattggccgcatgggaaacttaatgggtgcgctgaaagtggaacaccctggcacgcaaaatcagcgtttcgattttgccctgttcaacgaccagttcaaacaaagctttggctactcgctctaatga

SEQ ID NO: 1306 - protein, 321 aa, synthetic construct
  REGION 1..321: note = Variant of adenosine kinase
MHHHHHHGGSGMSALICGSLAYDTIMVFPDQFKNHILPDKVHILNVSFLVPRLRREFGGCAGNIAYNLHLLGGAPIPMGTVGQDFQPYREHFETLGIDLSRVKIIDDLFTAQAFITTDHDHNQITAFHPGAMMRSYENHVRDVPGVTLGLVGPDGREGMIQNAEEFAAAGIPFIFDPGQALPLFNGPELREFIEQADYVVVNDYESNLLQTRTGWNEQDIVSRVQAYITTQGSKGALVHTPEKTYDIRPAHERRVVDPTGCGDAFRAGLIYGIQHNYDWLTIGRMGNLMGALKVEHPGTQNQRFDFALFNDQFKQSFGYSL

SEQ ID NO: 1307 - DNA, 969 bp, synthetic construct
  misc_feature 1..969: note = Variant of adenosine kinase
  source 1..969: mol_type = other DNA
atgcaccatcatcaccatcacgggggctccggcatgagtgcactgatttgcggttctttagcgtatgataccatcatggtgtttccggaccaattcaagaatcatattctgcccgataaagttcacattctcaatgtcagctttcttgtaccacgcctgcgccgtgaatttggaggctgtgccggcaacattgcgtacaatctgcatctgttgggtggtgcaccgatcgtcatggccacggtgggccaagatttccagccgtatcgcgaacacttcgaaactctgggcattgacttaagtcgcgtcaagatcatcgatgatctgtttacagcgcaggccttcattacgaccgaccatgatcataaccagattacggcgtttcatccaggggcaatgatgcgttcgtacgaaaatcacgttcgtgatgtgccgggtgttaccttgggcctcgtaggtcctgatgggcgcgagggcatgatccaaaatgccgaagaatttgctgcggcggacattccgttcatttttgacccaggtcaggcactgccgctgttcaacggccccgaactgcgcgagtttatcgaacaggcggactatgtggtggtcaacgattacgaaagcaatctgcttcaaacgcgtactggctggaacgagcaggacattgtttcacgcgtgcaggcgtatatcaccacgcaaggttcgcgcggagccctggtacatacaccggagaagacctacgatattcgtccggcacacgaacgtcgtgtcgttgatccaactggttgcggcgacgcgtttcgcgccggcctgatctatggtattcagcataattatgattggttgaccattggccgcatgggaaacttaatgggtgcgctgaaagtggaacaccctggcacgcaaaatcagcgtttcgattttgccctgttcaacgaccagttcaaacaaagctttggctactcgctctaatga

SEQ ID NO: 1308 - protein, 321 aa, synthetic construct
  REGION 1..321: note = Variant of adenosine kinase
MHHHHHHGGSGMSALICGSLAYDTIMVFPDQFKNHILPDKVHILNVSFLVPRLRREFGGCAGNIAYNLHLLGGAPIVMATVGQDFQPYREHFETLGIDLSRVKIIDDLFTAQAFITTDHDHNQITAFHPGAMMRSYENHVRDVPGVTLGLVGPDGREGMIQNAEEFAAADIPFIFDPGQALPLFNGPELREFIEQADYVVVNDYESNLLQTRTGWNEQDIVSRVQAYITTQGSRGALVHTPEKTYDIRPAHERRVVDPTGCGDAFRAGLIYGIQHNYDWLTIGRMGNLMGALKVEHPGTQNQRFDFALFNDQFKQSFGYSL

SEQ ID NO: 1309 - DNA, 969 bp, synthetic construct
  misc_feature 1..969: note = Variant of adenosine kinase
  source 1..969: mol_type = other DNA
atgcaccatcatcaccatcacgggggctccggcatgagtgcactgatttgcggttctttagcgtatgataccatcatggtgtttccggaccagttcaagaaccatattctgcccgatcgtgttcaccgcctcaatgtcagctttcttgtaccacgcatgcgtcgtgaatttggaggctgtgccggcaacattgcgtacaatctgcatctgttgggtggtgctccgatcgtaatggctacggtgggccaagatttcggtccgtatcgcgagcacttcgaaactctgggcattgacttatcccgcgtcaagatcatcgatgatctgagtacaccgcaggccttcattaccaccgaccatgatcataaccagattacggcgtttcatccaggcgcaatgatgcgttcgtacgaaaatcacgttcgtgatgtgccgggtgttaccttgggcctcgtaggtcctgatggacgcgagggcatgatccaaaatgccgaagaatttgctgctggtggcattccgttcatttttgacccaggtcaggcactgccgctgttcaacggccccgaactgcgcgagtttatcgaacaggcggactatgtggtggtcaacgattacgaaagcaatcttcttcaaacgcgtactggctggaacgagcaggacattgtttcacgcgtgcaggcgtatatcaccacgcaaggttcgaaaggagccctggtacatacaccggagaagacctacgatattccgccggcacacgaacgtcgtgtcgttgatccaactggttgcggcgacgcgtttcgcgccggcctgatctatggtattcagcataattatgattggttgaccattggccgcatgggaaacttaatgggtgcgctgaaagtggaacaccctggcacgcaaaatcagcgtttcgattttgccgaattcaacgaccagttcaaacaatattttggctacgcgctctaatga

SEQ ID NO: 1310 - protein, 321 aa, synthetic construct
  REGION 1..321: note = Variant of adenosine kinase
MHHHHHHGGSGMSALICGSLAYDTIMVFPDQFKNHILPDRVHRLNVSFLVPRMRREFGGCAGNIAYNLHLLGGAPIVMATVGQDFGPYREHFETLGIDLSRVKIIDDLSTPQAFITTDHDHNQITAFHPGAMMRSYENHVRDVPGVTLGLVGPDGREGMIQNAEEFAAGGIPFIFDPGQALPLFNGPELREFIEQADYVVVNDYESNLLQTRTGWNEQDIVSRVQAYITTQGSKGALVHTPEKTYDIPPAHERRVVDPTGCGDAFRAGLIYGIQHNYDWLTIGRMGNLMGALKVEHPGTQNQRFDFAEFNDQFKQYFGYAL

SEQ ID NO: 1311 - DNA, 969 bp, synthetic construct
  misc_feature 1..969: note = Variant of adenosine kinase
  source 1..969: mol_type = other DNA
atgcaccatcatcaccatcacgggggctccggcatgagtgcactgatttgcggttctttagcgtatgataccatcatggtgtttccggaccagttcaagaaccatattctgcccgatcgtgttcaccgcctcaatgtcagctttcttgtaccacgcatgcgtcgtgaatttggaggctgtgccggcaacattgcgtacaatctgcatctgttgggtggtgctccgatcgtaatggctacggtgggccaagatttcggtccgtatcgcgagcacttcgaaactctgggcattgacttatcccgcgtcaagatcatcgatgatctgagtacaccgcaggccttcattaccaccgacatggatcataaccagattacggcgtttcacggcggcgcaatgatgcgttcgtacgaaaatcacgttcgtgatgtgccgggtgttaccttgggcctcgtaggtcctgatggacgcgagggcatgatccaaaatgccgaagaatttgctgctggtggcattccgttcatttttgacccaggtcaggcagtgccgctgttcaacggccccgaactgcgcgagtttatcgaacaggcggactatgtggtggtcaacgattacgaaagcaatcttcttcaagcccgtactggctggaacgagcaggacattgtttcacgcgtgcaggcgtatatcaccacgcaaggttcggctggagccctggtacatacaccggagaagacctacgatattccgccggctaaaacccgtcgtgtcgttgatccaactggttgcggcgacgcgtttcgcgccggcctgatctatggtattcagcataattatgattggttgaccattggccgcatgggaaacttaatgggtgcgctgaaagtggaacaccctggcacccaaaatcagcgtttcgattttgccgaattcaacgaccagttcaaacaatattttggctacgcgctctaatga

SEQ ID NO: 1312 - protein, 321 aa, synthetic construct
  REGION 1..321: note = Variant of adenosine kinase
MHHHHHHGGSGMSALICGSLAYDTIMVFPDQFKNHILPDRVHRLNVSFLVPRMRREFGGCAGNIAYNLHLLGGAPIVMATVGQDFGPYREHFETLGIDLSRVKIIDDLSTPQAFITTDMDHNQITAFHGGAMMRSYENHVRDVPGVTLGLVGPDGREGMIQNAEEFAAGGIPFIFDPGQAVPLFNGPELREFIEQADYVVVNDYESNLLQARTGWNEQDIVSRVQAYITTQGSAGALVHTPEKTYDIPPAKTRRVVDPTGCGDAFRAGLIYGIQHNYDWLTIGRMGNLMGALKVEHPGTQNQRFDFAEFNDQFKQYFGYAL

SEQ ID NO: 1313 - DNA, 1257 bp, synthetic construct
  misc_feature 1..1257: note = Variant of acetate kinase
  source 1..1257: mol_type = other DNA
atgcaccatcatcatcatcatggcggtagcggcatgaaagttctggtgattaattctggtagctcctccatcaaatatcagctcctcgatatgaccaacgaaaaggtattagcgaaaggcttggtcgagcgcattggcatcgacggttcgcgtatcgtgcataaagttaacggcgaaaaacacgtgctggaacatgagattaagaatcacgaaattggacttaaattggtcctggatcttcttacggacgaaaaatacggtgtgttgaaggatctcaaagaaatcgatgcagttgggcatcgcgtagtacatggcggcgagcgttttgccagtagcgtgaagattactgacgaagtcttaaagaccatcgagacgttgtcgttcttagctccgttacacaatccagcgaacattatgggtatcaagagcagcatgaaattattaccgggtgtgcctcaagttgccgtctttgatacagcgttccaccagaagatgccggagaaagcctatttgtacgcaatcccctatgagtactacgagaaatataaaattcgccgctatgggtttcatggaacctcacatcgttatgtgagtaaacgtgctgcggaaattatgggcaaaccgtacgatcagctcaagatcattaccgttcacgtgggtaacggcgcatcagttgcggcggtgaagaatggcgtatctgttgacacttccatgggtttcacaccacttgaaggtcttgtcatgggcacgcgcagcggcgatattgatccggccatcgtggaatttcttgagaaagaagaaggattgtcggccaaagaagtcgtcaacatcctcaacaagaaatctggtgtgtatgggctcaccaaaggctttagtagtgacatgcgtgacattgaagataatgctattgaaggtgatcctgtatgccgccttgcattcgatgtgtacgaatatcgtatcgcgaaatatattggcgcatacgctgcggccatgaacggtgttgacgcgatcgtctttaccgcaggagttggcgaaaatagcccgattatgcgcgaagaaattattgagaactacttgggctacttagggatcaagatcgataaagaagccaatgacttcaaaggtgaggagaagatcatttcaacgcccgattccaaagtgattgcgatggtagttccgaccaacgaggagctcatgatcgccaaagacacgaaagaaatcattgagaaagggttggacgagcttaagatctaatga

SEQ ID NO: 1314 - protein, 417 aa, synthetic construct
  REGION 1..417: note = Variant of acetate kinase
MHHHHHHGGSGMKVLVINSGSSSIKYQLLDMTNEKVLAKGLVERIGIDGSRIVHKVNGEKHVLEHEIKNHEIGLKLVLDLLTDEKYGVLKDLKEIDAVGHRVVHGGERFASSVKITDEVLKTIETLSFLAPLHNPANIMGIKSSMKLLPGVPQVAVFDTAFHQKMPEKAYLYAIPYEYYEKYKIRRYGFHGTSHRYVSKRAAEIMGKPYDQLKIITVHVGNGASVAAVKNGVSVDTSMGFTPLEGLVMGTRSGDIDPAIVEFLEKEEGLSAKEVVNILNKKSGVYGLTKGFSSDMRDIEDNAIEGDPVCRLAFDVYEYRIAKYIGAYAAAMNGVDAIVFTAGVGENSPIMREEIIENYLGYLGIKIDKEANDFKGEEKIISTPDSKVIAMVVPTNEELMIAKDTKEIIEKGLDELKI

SEQ ID NO: 1315 - DNA, 1257 bp, synthetic construct
  misc_feature 1..1257: note = Variant of acetate kinase
  source 1..1257: mol_type = other DNA
atgcaccatcatcatcatcatggcggtagcggcatgaaagttctggtgattaattctggtagctcctccatcaaatatcagctcctcgatatgaccaacgaaaaggtattagcgaaaggcttggtcgagcgcattggcatcgacggttcgcgtatcgtgcataaagttaacggcgaaaaacacgtgctggaacatgagattaagaatcacgaaattggacttaaattggtcctggatcttcttacggacgaaaaatacggtgtgttgaaggatctcaaagaaatcgatgcagttgggcatcgcgtagtacatggcggcgagcgttttgccagtagcgtgaagattactgacgaagtcttaaagaccatcgagacgttgtcgttcttagctccgttacacaatccagcgaacattatgggtatcaagagcagcatgaaagtgttaccgggtgtgcctcaagttgccgtctttgatacagcgttccaccagaagatgccggagaaagcctatttgtacgcaatcccctatgagtactacgagaaatataaaattcgccgctatgggtttcatggaacctcacatcgttatgtgagtaaacgtgctgcggaaattatgggcaaaccgtacgatcagctcaagatcattaccgttcacgtgggtaacggcgcatcagttgcggcggtgaagaatggcgtatctgttgacacttccatgggtttcacaccacttgaaggtcttgtcatgggcacgcgcagcggcgatattgatccggccatcgtggaatttcttgagaaagaagaaggattgtcggccaaagaagtcgtcaacatcctcaacaagaaatctggtgtgtatgggctcaccaaaggctttagtagtgacatgcgtgacattgaagataatgctattgaaggtgatcctgtatgccgccttgcattagatgtgtacgaatatcgtatcgcgaaatatattggcgcatacgctgcggccatgaacggtgttgacgcgatcgtctttaccgcaggagttggcgaaaatagcccgattatgcgcgaagaaattattgagaactacttgggctacttagggatcaagatcgataaagaagccaatgacttcaaaggtgaggagaagatcatttcaacgcccgattccaaagtgattgcgatggtagttccgaccaacgaggagctcatgatcgccaaagacacgaaagaaatcattgagaaagggttggacgagcttaagatctaatga

SEQ ID NO: 1316 - protein, 417 aa, synthetic construct
  REGION 1..417: note = Variant of acetate kinase
MHHHHHHGGSGMKVLVINSGSSSIKYQLLDMTNEKVLAKGLVERIGIDGSRIVHKVNGEKHVLEHEIKNHEIGLKLVLDLLTDEKYGVLKDLKEIDAVGHRVVHGGERFASSVKITDEVLKTIETLSFLAPLHNPANIMGIKSSMKVLPGVPQVAVFDTAFHQKMPEKAYLYAIPYEYYEKYKIRRYGFHGTSHRYVSKRAAEIMGKPYDQLKIITVHVGNGASVAAVKNGVSVDTSMGFTPLEGLVMGTRSGDIDPAIVEFLEKEEGLSAKEVVNILNKKSGVYGLTKGFSSDMRDIEDNAIEGDPVCRLALDVYEYRIAKYIGAYAAAMNGVDAIVFTAGVGENSPIMREEIIENYLGYLGIKIDKEANDFKGEEKIISTPDSKVIAMVVPTNEELMIAKDTKEIIEKGLDELKI

SEQ ID NO: 1317 - DNA, 1257 bp, synthetic construct
  misc_feature 1..1257: note = Variant of acetate kinase
  source 1..1257: mol_type = other DNA
atgcaccatcatcatcatcatggcggtagcggcatgaaagttctggtgattaattctggtagctcctccatcaaatatcagctcctcgatatgaccaacgaaaaggtattagcgaaaggcttggtcgagcgcattggcatcgacggttcgcgtatcgtgcataaagttaacggcgaaaaacacgtgctggaacatgagattaagaatcacgaaattggacttaaattggtcctggatcttcttacggacgaaaaatacggtgtgttgaaggatctcaaagaaatcgatgcagttgggcatcgcgtagtacatggcggcgagcgttttgccagtagcgtgaagattactgacgaagtcttaaagaccatcgagacgttgtcgttcttagctccgttacacaatccagcgaacattatgggtatcaagagcagcatgaaagtgttaccgggtgtgcctcaagttgccgtctttgatacagcgttccaccagaagatgccggagaaagcctatttgtacgcaatcccctatgagtactacgagaaatataaaattcgccgctatgggtttcatggaacctcacatcgttatgtgagtaaacgtgctgcggaaattatgggcaaaccgtacgatcagctcaagatcattaccgttcacgtgggtaacggcgcatcagttgcggcggtgaagaatggcgtatctgttgacacttccatgggtttcacaccacttgaaggtcttgtcatgggcacgcgcagcggcgatattgatccggccatcgtggaatttcttgagaaagaagaaggattgtcggccaaagaagtcgtcaacatcctcaacaagaaatctggtgtgtatgggctcaccaaaggctttagtagtgacatgcgtgacattgtggataatgctattgaaggtgatcctgtatgccgccttgcattagatgtgtacgaatatcgtatcgcgaaatatattggcgcatacgctgcggccatgaacggtgttgacgcgatcgtctttaccgcaggagttggcgaaaatagcccgattatgcgcgaagaaattattgagaactacttgggctacttagggatcaagatcgataaagaagccaatgacttcaaaggtgaggagaagatcatttcaacgcccgattccaaagtgattgcgatggtagttccgaccaacgaggagctcatgatcgccaaagacacgaaagaaatcattgagaaagggttggacgagcttaagatctaatga

SEQ ID NO: 1318 - protein, 417 aa, synthetic construct
  REGION 1..417: note = Variant of acetate kinase
MHHHHHHGGSGMKVLVINSGSSSIKYQLLDMTNEKVLAKGLVERIGIDGSRIVHKVNGEKHVLEHEIKNHEIGLKLVLDLLTDEKYGVLKDLKEIDAVGHRVVHGGERFASSVKITDEVLKTIETLSFLAPLHNPANIMGIKSSMKVLPGVPQVAVFDTAFHQKMPEKAYLYAIPYEYYEKYKIRRYGFHGTSHRYVSKRAAEIMGKPYDQLKIITVHVGNGASVAAVKNGVSVDTSMGFTPLEGLVMGTRSGDIDPAIVEFLEKEEGLSAKEVVNILNKKSGVYGLTKGFSSDMRDIVDNAIEGDPVCRLALDVYEYRIAKYIGAYAAAMNGVDAIVFTAGVGENSPIMREEIIENYLGYLGIKIDKEANDFKGEEKIISTPDSKVIAMVVPTNEELMIAKDTKEIIEKGLDELKI

SEQ ID NO: 1319 - DNA, 1587 bp, synthetic construct
  misc_feature 1..1587: note = Variant of terminal deoxynucleotidyltransferase
  source 1..1587: mol_type = other DNA
atgcaccatcatcatcatcatggcggtagcggcagccacggcattcgtaccatcgattcggacttcgggaagaaacagcagaaaaaaggcgataaccacgatagttccgccacttatgaaatcaaatttcacgagtttgtgctgttcattctcgaagaaaaaatgggtgcgacgcgtcgtacttttctgacagatttagcccgcaagaaagggttccgcgtcgagaatgaactgaccgacgaagttacccacatcgtggcagaaaatctgtcacgctctgaagtattggcttggctgaaagaacacaagatggagaagaccaagcaattcgaactgctggatattagctggcttatcgaaagcatgaaagttggtaaaccggtggacaccaaggggaaataccagttggcggaatcggttgaggtgagtgcgaacccagatccgacagaaggtcgtgtaaacgagctgcctcctactatgaaaaccgtttctccgtatgcgtgtcaacgccgcaccaccctgaacaaccgtaatcaacgttttacggactcgctggaaattcttcgtgaaaattacgagttcaaacgcaacgatgatactgcgctggaatttcgtcgtgctatctccgtgctgaaaagccttccgtttgaggtacgtagcctgaaagacacggaaggattgccctggatcggtgatgaagtcaaagggattatggaagaaatcatcgaggtcggggagtcgcgtgaagtgcaggccgtgctcaatgatgagtggtatcaaagcttccaccgctttaagagtgtctttggagtgggggtgaagacagcagacaagtggtaccgtatgggtctgcgcaccctcgaggatgttcgttccagcaagaccctgaagttgaccccgatgcagaaagtaggtctgctgtattatgaagatcttgctcgcggcgttacgcgtgccgaagctgacgcgatttggctgctggttcaggatgcagtcgcaactttcgacccggatgcgatcgtggagattgtcggtggatttcgtcgtgggaaacctcagggtcacgacgttgatctgcttatcagttctccgggagctgagaaagagcaagaagaccaactcctgcagaaagtgatgaatctgtggaagaaacaagggttgttgctgtacggtcgtctggaatggacccagtgggaagatgggggttcgccttccggtaaggctgacgagggtgacgcgggtgcgaaatgctttctgatcctcaaactttatgatcatctggtgcgtaaaagcaaatggaacatgccgacgggttcgaacgtgggcgagtccaaaccgtggaaagcaattcgcgtagatctgctgcgttgcccctatggcagttttgcgtttgcgatgttgcagtggaccggaagccgcatgttccgtcgtgatctgcgttggtacgccactgacgagaagaacatgatgctggacaatcattcgctgtatgacctgaccaagggtatcttcctccctgctaaatcggaagaggaaattttcgcacatctggggcttgaatacctggaaccgttcgaacgtaacgca

SEQ ID NO: 1320 - protein, 529 aa, synthetic construct
  REGION 1..529: note = Variant of terminal deoxynucleotidyltransferase
MHHHHHHGGSGSHGIRTIDSDFGKKQQKKGDNHDSSATYEIKFHEFVLFILEEKMGATRRTFLTDLARKKGFRVENELTDEVTHIVAENLSRSEVLAWLKEHKMEKTKQFELLDISWLIESMKVGKPVDTKGKYQLAESVEVSANPDPTEGRVNELPPTMKTVSPYACQRRTTLNNRNQRFTDSLEILRENYEFKRNDDTALEFRRAISVLKSLPFEVRSLKDTEGLPWIGDEVKGIMEEIIEVGESREVQAVLNDEWYQSFHRFKSVFGVGVKTADKWYRMGLRTLEDVRSSKTLKLTPMQKVGLLYYEDLARGVTRAEADAIWLLVQDAVATFDPDAIVEIVGGFRRGKPQGHDVDLLISSPGAEKEQEDQLLQKVMNLWKKQGLLLYGRLEWTQWEDGGSPSGKADEGDAGAKCFLILKLYDHLVRKSKWNMPTGSNVGESKPWKAIRVDLLRCPYGSFAFAMLQWTGSRMFRRDLRWYATDEKNMMLDNHSLYDLTKGIFLPAKSEEEIFAHLGLEYLEPFERNA

SEQ ID NO: 1321 - DNA, 17 bp, synthetic construct
  misc_feature 1..17: note = Modified oligo substrate or product
  modified_base 16^17: mod_base = OTHER; note = phosphorothioate linkage
  modified_base 17: mod_base = OTHER; note = 2'-methoxyguanosine
  source 1..17: mol_type = other DNA
ttttttttttttttatn

SEQ ID NO: 1322 - DNA, 18 bp, synthetic construct
  misc_feature 1..18: note = Modified oligo substrate or product
  modified_base 1: mod_base = OTHER; note = 2'-deoxythymidine with 6-carboxyfluorescein modification
  modified_base 17^18: mod_base = OTHER; note = phosphorothioate linkage
  modified_base 18: mod_base = OTHER; note = 2'-methoxyguanosine
  source 1..18: mol_type = other DNA
nttttttttttttttatn

SEQ ID NO: 1323 - DNA, 17 bp, synthetic construct
  misc_feature 1..17: note = Modified oligo substrate or product
  modified_base 15: mod_base = OTHER; note = 2'-methoxyguanosine
  modified_base 16: mod_base = OTHER; note = 2'-methoxyadenosine
  modified_base 17: mod_base = OTHER; note = 2'-methoxycytidine
  source 1..17: mol_type = other DNA
ttttttttttttttnnn

SEQ ID NO: 1324 - DNA, 18 bp, synthetic construct
  misc_feature 1..18: note = Modified oligo substrate or product
  modified_base 1: mod_base = OTHER; note = 2'-deoxythymidine with 6-carboxyfluorescein modification
  modified_base 16: mod_base = OTHER; note = 2'-methoxyguanosine
  modified_base 17: mod_base = OTHER; note = 2'-methoxyadenosine
  modified_base 18: mod_base = OTHER; note = 2'-methoxycytidine
  source 1..18: mol_type = other DNA
nttttttttttttttnnn

SEQ ID NO: 1325 - DNA, 18 bp, synthetic construct
  misc_feature 1..18: note = Modified oligo substrate or product
  modified_base 16^17: mod_base = OTHER; note = phosphorothioate linkage
  modified_base 17: mod_base = OTHER; note = 2'-methoxyguanosine
  modified_base 18: mod_base = OTHER; note = guanosine ribonucleotide
  source 1..18: mol_type = other DNA
ttttttttttttttatnn

SEQ ID NO: 1326 - DNA, 19 bp, synthetic construct
  misc_feature 1..19: note = Modified oligo substrate or product
  modified_base 1: mod_base = OTHER; note = 2'-deoxythymidine with 6-carboxyfluorescein modification
  modified_base 17^18: mod_base = OTHER; note = phosphorothioate linkage
  modified_base 18: mod_base = OTHER; note = 2'-methoxyguanosine
  modified_base 19: mod_base = OTHER; note = guanosine ribonucleotide
  source 1..19: mol_type = other DNA
nttttttttttttttatnn

SEQ ID NO: 1327 - DNA, 18 bp, synthetic construct
  misc_feature 1..18: note = Modified oligo substrate or product
  modified_base 16^17: mod_base = OTHER; note = phosphorothioate linkage
  modified_base 17: mod_base = OTHER; note = 2'-methoxyguanosine
  modified_base 18: mod_base = OTHER; note = adenosine ribonucleotide
  source 1..18: mol_type = other DNA
ttttttttttttttatnn

SEQ ID NO: 1328 - DNA, 19 bp, synthetic construct
  misc_feature 1..19: note = Modified oligo substrate or product
  modified_base 1: mod_base = OTHER; note = 2'-deoxythymidine with 6-carboxyfluorescein modification
  modified_base 17^18: mod_base = OTHER; note = phosphorothioate linkage
  modified_base 18: mod_base = OTHER; note = 2'-methoxyguanosine
  modified_base 19: mod_base = OTHER; note = adenosine ribonucleotide
  source 1..19: mol_type = other DNA
nttttttttttttttatnn

SEQ ID NO: 1329 - DNA, 18 bp, synthetic construct
  misc_feature 1..18: note = Modified oligo substrate or product
  modified_base 15: mod_base = OTHER; note = 2'-methoxyguanosine
  modified_base 16: mod_base = OTHER; note = 2'-methoxyadenosine
  modified_base 17: mod_base = OTHER; note = 2'-methoxycytidine
  modified_base 18: mod_base = OTHER; note = guanosine ribonucleotide
  source 1..18: mol_type = other DNA
ttttttttttttttnnnn

SEQ ID NO: 1330 - DNA, 19 bp, synthetic construct
  misc_feature 1..19: note = Modified oligo substrate or product
  modified_base 1: mod_base = OTHER; note = 2'-deoxythymidine with 6-carboxyfluorescein modification
  modified_base 16: mod_base = OTHER; note = 2'-methoxyguanosine
  modified_base 17: mod_base = OTHER; note = 2'-methoxyadenosine
  modified_base 18: mod_base = OTHER; note = 2'-methoxycytidine
  modified_base 19: mod_base = OTHER; note = guanosine ribonucleotide
  source 1..19: mol_type = other DNA
nttttttttttttttnnnn

SEQ ID NO: 1331 - DNA, 18 bp, synthetic construct
  misc_feature 1..18: note = Modified oligo substrate or product
  modified_base 15: mod_base = OTHER; note = 2'-methoxyguanosine
  modified_base 16: mod_base = OTHER; note = 2'-methoxyadenosine
  modified_base 17: mod_base = OTHER; note = 2'-methoxycytidine
  modified_base 18: mod_base = OTHER; note = 2'-fluoro guanosine
  source 1..18: mol_type = other DNA
ttttttttttttttnnnn

SEQ ID NO: 1332 - DNA, 19 bp, synthetic construct
  misc_feature 1..19: note = Modified oligo substrate or product
  modified_base 1: mod_base = OTHER; note = 2'-deoxythymidine with 6-carboxyfluorescein modification
  modified_base 16: mod_base = OTHER; note = 2'-methoxyguanosine
  modified_base 17: mod_base = OTHER; note = 2'-methoxyadenosine
  modified_base 18: mod_base = OTHER; note = 2'-methoxycytidine
  modified_base 19: mod_base = OTHER; note = 2'-fluoro guanosine
  source 1..19: mol_type = other DNA
nttttttttttttttnnnn

SEQ ID NO: 1333 - DNA, 18 bp, synthetic construct
  misc_feature 1..18: note = Modified oligo substrate or product
  modified_base 15: mod_base = OTHER; note = 2'-methoxyguanosine
  modified_base 16: mod_base = OTHER; note = 2'-methoxyadenosine
  modified_base 17: mod_base = OTHER; note = 2'-methoxycytidine
  modified_base 18: mod_base = OTHER; note = 2'-methoxyuridine
  source 1..18: mol_type = other DNA
ttttttttttttttnnnn

SEQ ID NO: 1334 - DNA, 19 bp, synthetic construct
  misc_feature 1..19: note = Modified oligo substrate or product
  modified_base 1: mod_base = OTHER; note = 2'-deoxythymidine with 6-carboxyfluorescein modification
  modified_base 16: mod_base = OTHER; note = 2'-methoxyguanosine
  modified_base 17: mod_base = OTHER; note = 2'-methoxyadenosine
  modified_base 18: mod_base = OTHER; note = 2'-methoxycytidine
  modified_base 19: mod_base = OTHER; note = 2'-methoxyuridine
  source 1..19: mol_type = other DNA
nttttttttttttttnnnn

SEQ ID NO: 1335 - DNA, 963 bp, synthetic construct
  misc_feature 1..963: note = variant of adenosine kinase from Xanthemonas campestris
  source 1..963: mol_type = other DNA
atgcaccatcatcaccatcacgggggctccggcatgagtgcactgatttgcggttctttagcgtatgataccatcatggtgtttccggaccagttcaagaaccatattctgcccgatcgtgttcaccgcctcaatgtcagctttcttgtaccacgcatgcgtcgtgaatttggaggctgtgccggcaacattgcgtacaatctgcatctgttgggtggtgctccgatcgtaatggctacggtgggccaagatttcggtccgtatcgcgagcacttcgaaactctgggcattgacttatcccgcgtcaagatcatcgatgatctgagtacaccgcaggccttcattaccaccgacatggatcataaccagattacggcgtttcatggcggcgcaatgatgcgttcgtacgaaaatcacgttcgtgatgtgccgggtgttaccttgggcctcgtaggtcctgatggacgcgagggcatgatccaaaatgccgaagaatttgctgctggtggcattccgttcatttttgacccaggtcaggcactgccgctgttcaacggccccgaactgcgcgagtttatcgaacaggcggactatgtggtggtcaacgattacgaaagcaatcttcttcaaacgcgtactggctggaacgagcaggacattgtttcacgcgtgcaggcgtatatcaccacgcaaggttcggctggagccctggtacatacaccggagaagacctacgatattccgccggctcacacccgtcgtgtcgttgatccaactggttgcggcgacgcgtttcgcgccggcctgatctatggtattcagcataattatgattggttgaccattggccgcatgggaaacttaatgggtgcgctgaaagtggaacaccctggcacccaaaatcagcgtttcgattttgccgaattcaacgaccagttcaaacaatattttggctacgcgctc

SEQ ID NO: 1336 - protein, 321 aa, synthetic construct
  REGION 1..321: note = variant of adenosine kinase from Xanthemonas campestris
MHHHHHHGGSGMSALICGSLAYDTIMVFPDQFKNHILPDRVHRLNVSFLVPRMRREFGGCAGNIAYNLHLLGGAPIVMATVGQDFGPYREHFETLGIDLSRVKIIDDLSTPQAFITTDMDHNQITAFHGGAMMRSYENHVRDVPGVTLGLVGPDGREGMIQNAEEFAAGGIPFIFDPGQALPLFNGPELREFIEQADYVVVNDYESNLLQTRTGWNEQDIVSRVQAYITTQGSAGALVHTPEKTYDIPPAHTRRVVDPTGCGDAFRAGLIYGIQHNYDWLTIGRMGNLMGALKVEHPGTQNQRFDFAEFNDQFKQYFGYAL

SEQ ID NO: 1337 - DNA, 963 bp, synthetic construct
  misc_feature 1..963: note = variant of adenosine kinase from Xanthemonas campestris
  source 1..963: mol_type = other DNA
atgcaccatcatcaccatcacgggggctccggcatgagtgcactgatttgcggttctttagcgtatgataccatcatggtgtttccggaccagttcaagaaccatattctgcccgatcgtgttcaccgcctcaatgtcagctttcttgtaccggacatgcgtcgtgaatttggaggctgtgccggcaacattgcgtacaatctgcatctgttgggtggtgctccgatcgtaatggctacggtgggccaagatttcggtccgtatcgcgagcacttcgaaactctgggcattgacttatcccgcgtcaagatcatcgatgatctgagtacaccgcaggccttcattaccaccgacatggatcataaccagattacggcgtttcacggcggcgcaatgatgcgttcgtacgaaaatcacgttcgtgatgtgccgggtgttaccttgggcctcgtaggtcctgatggacgcgagggcatgatccaaaatgccgaagaatttgctgctatgggcattccgttcatttttgacccaggtcaggcagtgccgctgttcaacggccccgaactgcgcgagtttatcgaacaggcggactatgtggtggtcaacgattacgaaagcaatcttcttcaagcccgtactggctggaacgagcaggacattgtttcacgcgtgcaggcgtatatcaccacgcaaggttcggctggagccctggtacatacaccggagaagacctacgatattccgccggctaaaacccgtcgtgtcgttgatccaactggttgcggcgacgcgtttcgcgccggcctgatctatggtattcagcataattatgattggttgaccattggccgcatgggaaacttaatgggtgcgctgaaagtggaacaccctggcacccaaaatcagcgtttcgattttgccgaattcaacgaccagttcaaacaatattttggctacgcgctc

SEQ ID NO: 1338 - protein, 321 aa, synthetic construct
  REGION 1..321: note = variant of adenosine kinase from Xanthemonas campestris
MHHHHHHGGSGMSALICGSLAYDTIMVFPDQFKNHILPDRVHRLNVSFLVPDMRREFGGCAGNIAYNLHLLGGAPIVMATVGQDFGPYREHFETLGIDLSRVKIIDDLSTPQAFITTDMDHNQITAFHGGAMMRSYENHVRDVPGVTLGLVGPDGREGMIQNAEEFAAMGIPFIFDPGQAVPLFNGPELREFIEQADYVVVNDYESNLLQARTGWNEQDIVSRVQAYITTQGSAGALVHTPEKTYDIPPAKTRRVVDPTGCGDAFRAGLIYGIQHNYDWLTIGRMGNLMGALKVEHPGTQNQRFDFAEFNDQFKQYFGYAL

SEQ ID NO: 1339 - DNA, 963 bp, synthetic construct
  misc_feature 1..963: note = variant of adenosine kinase from Xanthemonas campestris
  source 1..963: mol_type = other DNA
atgcaccatcatcaccatcacgggggctccggcatgagtgcactgatttgcggttctttagcgtatgataatatcatggtgtttccggaccagttcaagaaccatattctgcccgatcgtgttcaccgcctcaatgtcagctttcttgtaccggacatgcgtcgtgaatttggaggctgtgccggcaacattgcgtacaatctgcatctgttgggtggtgctccgatcgtaatggctacggtgggccaagatttcggtccgtatcgcgagcacttcgaaactctgggcattgacttatcccgcgtcaagatcatcgatgatctgagtacaccgcaggccttcattaccaccgacatggatcataaccagattacggcgtttcacggcggcgcaatgatgcgttcgtacgaaaatcacgttcgtgatgtgccgggtgttaccttgggcctcgtaggtcctgatggacgcgagggcatgatccaaaatgccgaagaatttgctgctatgggcattccgttcatttttgacccaggtcaggcagtgccgctgttcaacggccccgaactgcgcgagtttatcgaacaggcggactatgtggtggtcaacgattacgaaagcaatcttcttcaagcccgtactggctggaacgagcaggacattgtttcacgcgtgcaggcgtatatcaccacgcaaggttcggctggagccctggtacatacaccggagaagacctacgatattccgccggctaaaacccgtcgtgtcgttgatccaactggttgcggcgacgcgtttcgcgccggcctgatctatggtattcagcataattatgattggttgaccattggccgcatgggaaacttaatgggtgcgctgaaagtggaacaccctggcacccaaaatcagcgtttcgattttgccgaattcaacgaccagttcaaacaatattttggctacgcgctc

SEQ ID NO: 1340 - protein, 321 aa, synthetic construct
  REGION 1..321: note = variant of adenosine kinase from Xanthemonas campestris
MHHHHHHGGSGMSALICGSLAYDNIMVFPDQFKNHILPDRVHRLNVSFLVPDMRREFGGCAGNIAYNLHLLGGAPIVMATVGQDFGPYREHFETLGIDLSRVKIIDDLSTPQAFITTDMDHNQITAFHGGAMMRSYENHVRDVPGVTLGLVGPDGREGMIQNAEEFAAMGIPFIFDPGQAVPLFNGPELREFIEQADYVVVNDYESNLLQARTGWNEQDIVSRVQAYITTQGSAGALVHTPEKTYDIPPAKTRRVVDPTGCGDAFRAGLIYGIQHNYDWLTIGRMGNLMGALKVEHPGTQNQRFDFAEFNDQFKQYFGYAL

SEQ ID NO: 1341 - DNA, 963 bp, synthetic construct
  misc_feature 1..963: note = variant of adenosine kinase from Xanthemonas campestris
  source 1..963: mol_type = other DNA
atgcatcatcaccatcaccatggggggtccggtatgagtgcactcatttgcggttctttagcgtatgataacatcatggtgtttccggaccagttcaagaaccatattctgcccgatcgtgttcaccgcctcaatgtcagctttcttgtaccggacatgcgtcgtgaatttggaggctgtgccggcaacattgcgtacaatctgcatctgttgggtggtgctccgatcgtaatggctacggtgggccaagatttcggtccgtatcgcgagcacttcgaaactctgggcattgacttatcccgcgtcaagatcatcgatgatctgagtacaccgcaggccttcattaccaccgacatggatcaaaaccagattacggcgtttcacagcggcgcaatgatgcgttcgtacgaaaatcacgttcgtgatgtgccgggtgttaccttgggcctcgtaggtcctgatggacgcgagggcatgatccaaaatgccgaagaatttgctgctatgggcattccgttcatttttgacccaggtcaggcagtgcctctgttcaacggccccgaactgcgcgagtttatcgaacaggcggactatgtggtggtcaacgattacgaaagccgtcttcttcaagcccgtactggctggaacgagcaggacattgtttcacgcgtgcaggcgtatatcaccacgcaaggttcggctggagccgtggtacatacaccggagaagacctacgatattccggctgctaaaactcgtcgtgtcgttgatccaactggttgcggcgacgcgtttcgcgccggcctgatctatggtattcagcataattatgattggttgaccattggccgcatgggaaacttaatgggtgcgctgaaagtggaacaccctggcacccaaaatcagcgtttcgattttgccgaattcaacgaccagttcaaacaatattttggctacgcgctc

SEQ ID NO: 1342 - protein, 321 aa, synthetic construct
  REGION 1..321: note = variant of adenosine kinase from Xanthemonas campestris
MHHHHHHGGSGMSALICGSLAYDNIMVFPDQFKNHILPDRVHRLNVSFLVPDMRREFGGCAGNIAYNLHLLGGAPIVMATVGQDFGPYREHFETLGIDLSRVKIIDDLSTPQAFITTDMDQNQITAFHSGAMMRSYENHVRDVPGVTLGLVGPDGREGMIQNAEEFAAMGIPFIFDPGQAVPLFNGPELREFIEQADYVVVNDYESRLLQARTGWNEQDIVSRVQAYITTQGSAGAVVHTPEKTYDIPAAKTRRVVDPTGCGDAFRAGLIYGIQHNYDWLTIGRMGNLMGALKVEHPGTQNQRFDFAEFNDQFKQYFGYAL

SEQ ID NO: 1343 - DNA, 963 bp, synthetic construct
  misc_feature 1..963: note = variant of adenosine kinase from Xanthemonas campestris
  source 1..963: mol_type = other DNA
atgcatcatcaccatcaccatggggggtccggtatgagtgcactcatttgcggttctttagcgtatgataacatcatggtgtttccggaccagttcaagaaccatattctgcccgatcgtgttcaccgcctcaatgtcagctttctggtatttgacatgcgtcgtgaatttggaggctgtgccggcaacattgcgtacaatctgcatctgttgggtggtgctccgatcgtaatggctacggtgggccaagatttcggtccgtatcgcgaacacttcgaaactctgggcattgacttatcccgcgtcaagatcatcgatgatctgagtacaccgcaggccttcattaccaccgacatggatcaaaaccagattacggcgtttcacagcggcgcaatgatgcgttcgtacgaaaatcacgttcgtgatgtgccgggtgttaccttgggcctcgtaggtcctgatggacgcgagggcatgatccaaaatgccgaagaatttgctgctatgggcattccgttcatttttgacccaggtcaggcagtgcctctgttcaacggccccgaactgcgcgaatttatcgaacaggcggactatgtggtggtcaacgattacgaaagccgtcttcttcaagcccgtactggctggaacgagcaggacattgtttcacgcgtgcaggcgtatatcaccacgcaaggttcggctggagccgtggtacatacaccggagaagacctacgatattccggctgctaaaactcgtcgtgtcgttgatccaactggttgcggcgacgcgtttcgcgccggcctgatctatggtattcagcataattatgattggttgaccattggccgcatgggaaacttaatgggtgcgctgaaagtggaacaccctggcacccaaaatcagcgtttcgattttgccgaattcaacgaccagttcaaacaatattttggctacgcgctc

SEQ ID NO: 1344 - protein, 321 aa, synthetic construct
  REGION 1..321: note = variant of adenosine kinase from Xanthemonas campestris
MHHHHHHGGSGMSALICGSLAYDNIMVFPDQFKNHILPDRVHRLNVSFLVFDMRREFGGCAGNIAYNLHLLGGAPIVMATVGQDFGPYREHFETLGIDLSRVKIIDDLSTPQAFITTDMDQNQITAFHSGAMMRSYENHVRDVPGVTLGLVGPDGREGMIQNAEEFAAMGIPFIFDPGQAVPLFNGPELREFIEQADYVVVNDYESRLLQARTGWNEQDIVSRVQAYITTQGSAGAVVHTPEKTYDIPAAKTRRVVDPTGCGDAFRAGLIYGIQHNYDWLTIGRMGNLMGALKVEHPGTQNQRFDFAEFNDQFKQYFGYAL

SEQ ID NO: 1345 - DNA, 963 bp, synthetic construct
  misc_feature 1..963: note = variant of adenosine kinase from Xanthemonas campestris
  source 1..963: mol_type = other DNA
atgcatcatcaccatcaccatggggggtccggtatgagtgcactcatttgcggttctttagcgtatgataacatcatggtgtttccggaccagttcaagaaccatattctgcccgatcgtgttcaccgcctcaatgtcagctttctggtatttgacatgcgtcgtgaatttggaggctgtgccggcaacattgcgtacaatctgcatctgttgggtggtgctccgatcgtaatggctacggtgggccaagatttcggtccgtatcgcgaacacttcgaaactctgggcattgacttatcccgcgtcaagatcatcgatgatctgagtacaccgcaggggttcattaccaccgacatggatcaaaaccagattacggcgtttcacagcggcgcaatgatgcgttcgtacgaaaatcacgttcgtgatgtgccgggtgttaccttgggcctcgtaggtcctgatggacgcgagggcatgatccaaaatgccgaagaatttgctgctatgggcattccgttcatttttgacccaggtcaggcagtgcctctgttcaacggccccgaactgcgcgaatttatcgaacaggcggactatgtggtggtcaacgattacgaaagccgtcttcttcaagcccgtactggctggaacgagcaggacattgtttcacgcgtgcaggcgtatatcaccacgcaaggttcggctggagccgtggtacatacaccggagaagacctacgatattccggctgctaaaactcgtcgtgtcgttgatccaactggttgcggcgacgcgtttcgcgccggcctgatctatggtattcagcataattatgattggttgaccattggccgcatgggaaacttaatgggtgcgctgaaagtggaacaccctggcacccaaaatcagcgtttcgattttgccgaattcaacgaccagttcaaacaatattttggctacgcgctc

SEQ ID NO: 1346 - protein, 321 aa, synthetic construct
  REGION 1..321: note = variant of adenosine kinase from Xanthemonas campestris
MHHHHHHGGSGMSALICGSLAYDNIMVFPDQFKNHILPDRVHRLNVSFLVFDMRREFGGCAGNIAYNLHLLGGAPIVMATVGQDFGPYREHFETLGIDLSRVKIIDDLSTPQGFITTDMDQNQITAFHSGAMMRSYENHVRDVPGVTLGLVGPDGREGMIQNAEEFAAMGIPFIFDPGQAVPLFNGPELREFIEQADYVVVNDYESRLLQARTGWNEQDIVSRVQAYITTQGSAGAVVHTPEKTYDIPAAKTRRVVDPTGCGDAFRAGLIYGIQHNYDWLTIGRMGNLMGALKVEHPGTQNQRFDFAEFNDQFKQYFGYAL

SEQ ID NO: 1347 - DNA, 963 bp, synthetic construct
  misc_feature 1..963: note = variant of adenosine kinase from Xanthemonas campestris
  source 1..963: mol_type = other DNA
atgcatcatcaccatcaccatggggggtccggtatgagtgcactcatttgcggttctttagcgtatgataacatcatggtgtttccggaccagttcaagaaccatattctgcccgatcgtgttcaccgcctcaatgtcagctttctggtatttgacatgcgtcgtgaatttggaggctgtgccggcaacattgcgtacaatctgcatctgttgggtggtgctccgatcgtaatggctacggtgggccaagatttcggtccgtatcgcgaacacttcgaaactctgggcattgacttatcccgcgtcaagatcatcgatgatctgagtacaccgcaggggttcattaccaccgacatggatcaaaaccagattacggcgtttcacagcggcgcaatgatgcgttcgtacgaaaatcacgttcgtgatgtgccgggtgttaccttgggcctcgtaggtcctgatggacgcgagggcatgatccaaaatgccgaagaatttgctgctatgggcattccgttcatttttgacccaggtcaggcagtgcctctgttcagcggcccggaactgcgcgaatttatcgaacaggcggactatgtggtggtcaacgattacgaaagccgtcttcttcaagcccgtactggctggaacgagcaggacattgttagccgcgtgcaggcgtatatcaccacgcaaggttcggctggagccgtggtacatacaccggagaagacctacgatattccggctgctaaaactcgtcgtgtcgttgatccaactggttgcggcgacgcgtttcgcgccggcctgatctatggtattcagcatgaatatgattggttgaccattggccgcatgggaaacttaatgggtgcgctgaaagtggaacaccctggcacccaaaatcagcgtttcgattttgccgaattcaacgaccagttcaaacaatattttggctacgcgctc

SEQ ID NO: 1348 - protein, 321 aa, synthetic construct
  REGION 1..321: note = variant of adenosine kinase from Xanthemonas campestris
MHHHHHHGGSGMSALICGSLAYDNIMVFPDQFKNHILPDRVHRLNVSFLVFDMRREFGGCAGNIAYNLHLLGGAPIVMATVGQDFGPYREHFETLGIDLSRVKIIDDLSTPQGFITTDMDQNQITAFHSGAMMRSYENHVRDVPGVTLGLVGPDGREGMIQNAEEFAAMGIPFIFDPGQAVPLFSGPELREFIEQADYVVVNDYESRLLQARTGWNEQDIVSRVQAYITTQGSAGAVVHTPEKTYDIPAAKTRRVVDPTGCGDAFRAGLIYGIQHEYDWLTIGRMGNLMGALKVEHPGTQNQRFDFAEFNDQFKQYFGYAL

SEQ ID NO: 1349 - DNA, 963 bp, synthetic construct
  misc_feature 1..963: note = variant of adenosine kinase from Xanthemonas campestris
  source 1..963: mol_type = other DNA
atgcatcatcaccatcaccatggggggtccggtatgagtgcactcatttgcggttctttagcgtatgataacatcatggtgtttccggactatttcaagaaccatattctgcccgatcgtgttcaccgcctcaatgtcagctttctggtatttgacatgcgtcgtgaatttggaggctgtgccggcaacattgcgtacaatctgcatctgttgggtggtcgcccgatcgtaatggctacggtgggccaagatttcggtccgtatcgcgaacacttcgaaactctgggcattgacttatcccgcgtcaagatcatcgatgatctgagtacaccgcaggggttcattaccaccgacatggatcaaaaccagattacggcgtttcacagcggcgcaatgatgcgttcgtacgaaaatcacgttcgtgatgtgccgggtgttaccttgggcctcgtaggtcctgatggacgcgagggcatgatccaaaatgccgaagaatttgctgctatgggcattccgttcatttttgacccaggtcaggcagtgcctctgttcagcggcccggaactgcgcgaatttatcgaacaggcggactatgtggtggtcaacgattacgaaagccgccttcttcaagcccgtactggctggaacgagcaggacattgttagccgcgtgcaggcgtatatcaccacgcaaggttcggctggagccgtggtaatgacaccggagaagcgctacgttattccggctgctaaaactcgtcgtgtcgttgatccaactggttgcggcgacgcgtttcgcgccggcctgatctatggtattcagcatgaatatgattggttgaccattggccgcatgggaaacttaatgggtgcgctgaaagtggaacaccctggcacccaaaatcagcgtttcgattttgccgaattcaacgaccagttcaaacaatattttggctacgcgctc

SEQ ID NO: 1350 - protein, 321 aa, synthetic construct
  REGION 1..321: note = variant of adenosine kinase from Xanthemonas campestris
MHHHHHHGGSGMSALICGSLAYDNIMVFPDYFKNHILPDRVHRLNVSFLVFDMRREFGGCAGNIAYNLHLLGGRPIVMATVGQDFGPYREHFETLGIDLSRVKIIDDLSTPQGFITTDMDQNQITAFHSGAMMRSYENHVRDVPGVTLGLVGPDGREGMIQNAEEFAAMGIPFIFDPGQAVPLFSGPELREFIEQADYVVVNDYESRLLQARTGWNEQDIVSRVQAYITTQGSAGAVVMTPEKRYVIPAAKTRRVVDPTGCGDAFRAGLIYGIQHEYDWLTIGRMGNLMGALKVEHPGTQNQRFDFAEFNDQFKQYFGYAL

SEQ ID NO: 1351 - DNA, 963 bp, synthetic construct
  misc_feature 1..963: note = variant of adenosine kinase from Xanthemonas campestris
  source 1..963: mol_type = other DNA
atgcatcatcaccatcaccatggggggtccggtatgagtgcactcatttgcggttctttagcgtatgataacatcatgtggtttccggactatttcaagaaccatattctgcccgatcgtgttcaccgcctcaatgtcagctttctggtatttgacatgcgtcgtgaatttggaggctgtgccggcaacattgcgtacaatctgcatctgttgggtggtcgcccgatcgtaatggctacggtgggccaagatttcggtccgtatcgcgaacacttcgaaactctgggcattgacttatcccgcgtcaagatcatcgatgatctgagtacaccgcaggggttcattaccaccgacatggatcaaaaccagattacggcgtttcacagcggcgcaatgatgcgttcgtacgaaaatcacgttcgtgatgtgccgggtgttaccttgggcctcgtaggtcctgatggacgcgagggcatgatccaaaatgccgaagaatttgctgctatgggcattccgttcatttttgacccaggtcaggcagtgcctctgttcagcggcccggaactgcgcgaatttatcgaacaggcggactatgtggtggtcaacgattacgaaagccgccttcttcaagcccgtactggctggaacgagcaggacattgttagccgcgtgcaggcgtatatcaccacgcaaggttcggctggagccgtggtaatgacaccggagaagcgctacgttattccggctgctaaaactcgtcgtgtcgttgatccaactggttgcggcgacgcgtttcgcgccggcctgatctatggtattcagcatgaatatgattggttgaccattggccgcatgggaaacttaatgggtgcgctgaaagtggaacaccctggcacccaaaatcagcgtttcacctttgccgaattcaacgaccggttcaaacaatattttggctacgcgctc

SEQ ID NO: 1352 - protein, 321 aa, synthetic construct
  REGION 1..321: note = variant of adenosine kinase from Xanthemonas campestris
MHHHHHHGGSGMSALICGSLAYDNIMWFPDYFKNHILPDRVHRLNVSFLVFDMRREFGGCAGNIAYNLHLLGGRPIVMATVGQDFGPYREHFETLGIDLSRVKIIDDLSTPQGFITTDMDQNQITAFHSGAMMRSYENHVRDVPGVTLGLVGPDGREGMIQNAEEFAAMGIPFIFDPGQAVPLFSGPELREFIEQADYVVVNDYESRLLQARTGWNEQDIVSRVQAYITTQGSAGAVVMTPEKRYVIPAAKTRRVVDPTGCGDAFRAGLIYGIQHEYDWLTIGRMGNLMGALKVEHPGTQNQRFTFAEFNDRFKQYFGYAL

SEQ ID NO: 1353 - DNA, 1251 bp, synthetic construct
  misc_feature 1..1251: note = variant of acetate kinase from Marinitoga sp. 38H-ov
  source 1..1251: mol_type = other DNA
atgcaccatcatcatcatcatggcggtagcggcatgaaagttctggtgattaattctggtagctcctccatcaaatatcagctcctcgatatgaccaacgaaaaggtattagcgaaaggcttggtcgagcgcattggcatcgacggttcgcgtatcgtgcataaagttaacggcgaagggcacgtgctggaacatgagattaaaaatcacgaaattggacttaaattggtcctggatcttcttacggacgaaaaatacggtgtgttgaaggatctcaaagaaatcgatgcagttgggcatcgcgtagtacatggcggcgagcgttttgccagtagcgtgaagattactgacgaagtcttaaagaccatcgagacgttgtcgttcttagctccgttacacaatccagcgaacattatgggtatcaagagcagcatgaaagtgttaccgggtgtgcctcaagttgccgtctttgatacagcgttccaccagaagatgccggagaaagcctatttgtacgcaatcccctatgagtactacgagaaatataaaattcgccgctatgggtttcatggaacctcacatcgttatgtgagtaaacgtgctgcggaaattatgggcaaaccgtacgatcagctcaagatcattaccgttcacgtgggtaacggcgcatcagttgcggcggtgaagaatggcgtatctgttgacacttccatgggtttcacaccacttgaaggtcttgtcatgggcacgcgcagcggcgatattgatccggccatcgtggaatttcttgagaaagaagaaggattgtcggccaaagaagtcgtcaacatcctcaacaagaaatctggtgtgtatgggctcaccaaaggctttagtagtgacatgcgtgacattgtgctgaaggctattgaaggtgatcctgtatgccgccttgcattagatgtgtattattatcgtatcgcgaaatatattggcgcatacgctgcggccatgaacggtgttgacgcgatcgtctttaccgcaggagttggcgaaaatagcccgattatgcgcgaagaaattattgagaactacttgggctacttagggatcaagatcgataaagaagccaatgacttcaaaggtgaggagaagatcatttcaacgcccgattccaaagtgattgcgatggtagttccgaccaacgaggagctcatgatcgccaaagacacgaaagaaatcattgagaaagggttggacgagcttaagatc

SEQ ID NO: 1354 - protein, 417 aa, synthetic construct
  REGION 1..417: note = variant of acetate kinase from Marinitoga sp. 38H-ov
MHHHHHHGGSGMKVLVINSGSSSIKYQLLDMTNEKVLAKGLVERIGIDGSRIVHKVNGEGHVLEHEIKNHEIGLKLVLDLLTDEKYGVLKDLKEIDAVGHRVVHGGERFASSVKITDEVLKTIETLSFLAPLHNPANIMGIKSSMKVLPGVPQVAVFDTAFHQKMPEKAYLYAIPYEYYEKYKIRRYGFHGTSHRYVSKRAAEIMGKPYDQLKIITVHVGNGASVAAVKNGVSVDTSMGFTPLEGLVMGTRSGDIDPAIVEFLEKEEGLSAKEVVNILNKKSGVYGLTKGFSSDMRDIVLKAIEGDPVCRLALDVYYYRIAKYIGAYAAAMNGVDAIVFTAGVGENSPIMREEIIENYLGYLGIKIDKEANDFKGEEKIISTPDSKVIAMVVPTNEELMIAKDTKEIIEKGLDELKI

SEQ ID NO: 1355 - DNA, 693 bp, synthetic construct
  misc_feature 1..693: note = variant of adenylate kinase from Thermotoga neapolitana
  source 1..693: mol_type = other DNA
atgcaccatcatcaccatcacgggggctccggcatgggggcatatctggtgttcttaggtccgccgggcgcgggaaaaggtacccaaggccgtattatttcggcaaagactggcatcccgcatattagcacgggcgatatcctgcgtgacatcgtcgctacacagaacgatgaagttgcctcgaaaattaaagagatcatggagaaaggtgaactcgttccagatgaactgggtaatgatgtagtaaaacgccgcctgtcggagaaagactgcgaaaaaggctttattttggatggtttcccgcgtaccgtgcgccaagcggaatatctggatagttttcttgaaagccagaatcgccagttgacagccgccgtgctgattaaagtccccgaagatgaagttgttcagcgtctgctgtctcgcctgatctgtccgaaatgcgggcgtatctacaacatgatttttctgccaccaaaagaagacgagctgtgtgacgattgcggtgtcggcttagtacagcgtttagatgataaggaagaaacggtccgtcaccgcctgaaagtctaccttgagaagacccagccggtcattgactattatagtaagaaaggtattctcaaacgcgtagatgggtcgcaaggaatcgacaacgttgtggcagaagtcctgggggctctgggttggagcgataag

SEQ ID NO: 1356 - protein, 231 aa, synthetic construct
  REGION 1..231: note = variant of adenylate kinase from Thermotoga neapolitana
MHHHHHHGGSGMGAYLVFLGPPGAGKGTQGRIISAKTGIPHISTGDILRDIVATQNDEVASKIKEIMEKGELVPDELGNDVVKRRLSEKDCEKGFILDGFPRTVRQAEYLDSFLESQNRQLTAAVLIKVPEDEVVQRLLSRLICPKCGRIYNMIFLPPKEDELCDDCGVGLVQRLDDKEETVRHRLKVYLEKTQPVIDYYSKKGILKRVDGSQGIDNVVAEVLGALGWSDK

SEQ ID NO: 1357 - DNA, 693 bp, synthetic construct
  misc_feature 1..693: note = variant of adenylate kinase from Thermotoga neapolitana
  source 1..693: mol_type = other DNA
atgcaccatcatcaccatcacgggggctccggcatgggggcatatctggtgttcttaggtccgccgggcgcgggaaaaggtacccaaggccgtattatttcggcaaagactggcatcccgcatattagcacgggcgatatcctgcgtgacatcgtcgctaaaagcaacgatgaagttgcctcgaaaattaaagagatcatggagaaaggtgaactcgttccagatgaactgggtaatgatgtagtaaaacgccgcctgtcggagaaagactgcgaaaaaggctttattttggatggtttcccgcgtaccgtgcgccaagcggaatatctggatagttttcttgaaagccagaatcgccagttgacagccgccgtgctgattaaagtccccgaagatgaagttgttcagcgtctgctgtctcgcctgatctgtccgaaatgcgggcgtatctacaacatgatttttctgccaccaaaagaagacgagctgtgtgacgattgcggtgtcggcttagtacagcgtttagatgataaggaacatacggtccgtcaccgcctgaaagtctaccttgagaagacccagccggtcattgactattatagtaagaaaggtattctcaaacgcgtagatgggtcgcaaggaatcgacaacgttgtggcagaagtcctggggattctgggttggagcgataag

SEQ ID NO: 1358 - protein, 231 aa, synthetic construct
  REGION 1..231: note = variant of adenylate kinase from Thermotoga neapolitana
MHHHHHHGGSGMGAYLVFLGPPGAGKGTQGRIISAKTGIPHISTGDILRDIVAKSNDEVASKIKEIMEKGELVPDELGNDVVKRRLSEKDCEKGFILDGFPRTVRQAEYLDSFLESQNRQLTAAVLIKVPEDEVVQRLLSRLICPKCGRIYNMIFLPPKEDELCDDCGVGLVQRLDDKEHTVRHRLKVYLEKTQPVIDYYSKKGILKRVDGSQGIDNVVAEVLGILGWSDK

SEQ ID NO: 1359 - DNA, 693 bp, synthetic construct
  misc_feature 1..693: note = variant of adenylate kinase from Thermotoga neapolitana
  source 1..693: mol_type = other DNA
atgcaccatcatcaccatcacgggggctccggcatgggggcatatctggtgttcttaggtccgccgggcgcgggaaaaggtacccaaggccgtattatttcggcaaagactggcatcccgcatattagcacgggcgatatcctgcgtgacatcgtcgctacaagcaacgatgaagttgcctcgaaaattaaagagatcatggagaaaggtgaactcgttccagatgaactgggtaatgatgtagtaaaacgccgcctgtcggagaaagactgcgaaaaaggctttattttggatggtttcccgcgtaccgtgcgccaagcggaatatctggatagttttcttgaaagccagaatcgccagttgacagccgccgtgctgattaaagtccccgaagatgaagttgttcagcgtctgctgtctcgcctgatctgtccgaaatgcgggcgtatctacaacatgatttttctgccaccaaaagaagacgagctgtgtgacgattgcggtgtcggcttagtacagcgtttagatgataaggaagaaacggtccgtcaccgcctgaaagtctaccttgagaagacccagccggtcattgactattatagtaagaaaggtattctcaaagaagtagatgggtcgcaaggaatcgacaacgttgtggcagaagtcctggggctgctgggttggagcgataag

SEQ ID NO: 1360 - protein, 231 aa, synthetic construct
  REGION 1..231: note = variant of adenylate kinase from Thermotoga neapolitana
MHHHHHHGGSGMGAYLVFLGPPGAGKGTQGRIISAKTGIPHISTGDILRDIVATSNDEVASKIKEIMEKGELVPDELGNDVVKRRLSEKDCEKGFILDGFPRTVRQAEYLDSFLESQNRQLTAAVLIKVPEDEVVQRLLSRLICPKCGRIYNMIFLPPKEDELCDDCGVGLVQRLDDKEETVRHRLKVYLEKTQPVIDYYSKKGILKEVDGSQGIDNVVAEVLGLLGWSDK

SEQ ID NO: 1361 - DNA, 693 bp, synthetic construct
  misc_feature 1..693: note = variant of adenylate kinase from Thermotoga neapolitana
  source 1..693: mol_type = other DNA
atgcaccatcatcaccatcacgggggctccggcatgggggcatatctggtgttcttaggtccgccgggcgcgggaaaaggtacccaaggccgtattatttcggcaaagactggcatcccgcatattagcacgggcgatatcctgcgtgacatcgtcgctaagcaaaacgatgaagttgcctcgaagattaaagagatcatggagaaaggtgaactcgttccagatgaactgggtaatgcggtagtaaagatgcgcctgtcggagaaagactgcgaaaaaggctttattttggatggtttcccgcgtaccgtgcgccaagcggaatatctggatagttttcttgaaagccagaatcgccagttgacagccgccgtgctgattgaggtccccgaagatgaagttgttcagcgtctgctgtctcgcctgatctgtccgaaatgcgggcgtatctacaacatgattacgctgccaccaaaagaagacgagctgtgtgacgattgcggtgtcggcttagtacagcgtttagatgataaggaagaaacggtccgtcaccgcctgaaagtctaccgtgagaagacccagccggtcattgactattatagtaagaaaggtattctcaaacgcgtagatgggaaccaaggaatcgacaacgttgtggcagaagtcctggggattctgggttggagcgataag

SEQ ID NO: 1362 - protein, 231 aa, synthetic construct
  REGION 1..231: note = variant of adenylate kinase from Thermotoga neapolitana
MHHHHHHGGSGMGAYLVFLGPPGAGKGTQGRIISAKTGIPHISTGDILRDIVAKQNDEVASKIKEIMEKGELVPDELGNAVVKMRLSEKDCEKGFILDGFPRTVRQAEYLDSFLESQNRQLTAAVLIEVPEDEVVQRLLSRLICPKCGRIYNMITLPPKEDELCDDCGVGLVQRLDDKEETVRHRLKVYREKTQPVIDYYSKKGILKRVDGNQGIDNVVAEVLGILGWSDK

SEQ ID NO: 1363 - DNA, 693 bp, synthetic construct
  misc_feature 1..693: note = variant of adenylate kinase from Thermotoga neapolitana
  source 1..693: mol_type = other DNA
atgcaccatcatcaccatcacgggggctccggcatgggggcatatctggtgttcttaggtccgccgggcgcgggaaaaggtacccaaggccgtattatttcggcaaagactggcatcccgcatattagcacgggcgatatcctgcgtgacatcgtcgctaagcaaaacgatgaagttgcctcgagcattaaagagatcatggagaaaggtgaactcgttccagatgaactgggtaatgcggtagtaaagcgtcgcctgtcggagaaagactgcgaaaaaggctttattttggatggtttcccgcgtaccgtgcgccaagcggaatatctggatagttttcttgaaagccagaatcgccagttgacagccgccgtgctgattaaagtccccgaagatgaagttgttcagcgtctgctgtctcgcctgatctgtccgaaatgcgggcgtatctacaacatgattacgctgccaccaaaagaagacgagctgtgtgacgattgcggtgtcggcttagtacagcgtttagatgataaggaagaaacggtccgtcaccgcctgaaagtctaccatgagaagacccagccggtcattgactattatagtaagaaaggtattctcaaacgcgtagatgggtcgcaaggaatcgacaacgttgtggcagaagtcctggggattctgggttggagcgataag

SEQ ID NO: 1364 - protein, 231 aa, synthetic construct
  REGION 1..231: note = variant of adenylate kinase from Thermotoga neapolitana
MHHHHHHGGSGMGAYLVFLGPPGAGKGTQGRIISAKTGIPHISTGDILRDIVAKQNDEVASSIKEIMEKGELVPDELGNAVVKRRLSEKDCEKGFILDGFPRTVRQAEYLDSFLESQNRQLTAAVLIKVPEDEVVQRLLSRLICPKCGRIYNMITLPPKEDELCDDCGVGLVQRLDDKEETVRHRLKVYHEKTQPVIDYYSKKGILKRVDGSQGIDNVVAEVLGILGWSDK

SEQ ID NO: 1365 - DNA, 693 bp, synthetic construct
  misc_feature 1..693: note = variant of adenylate kinase from Thermotoga neapolitana
  source 1..693: mol_type = other DNA
atgcaccatcatcaccatcacgggggctccggcatgggggcatatctggtgttcttaggtccgccgggcgcgggaaaaggtacccaaggccgtattatttcggcaaagactggcatcccgcatattagcacgggcgatatcctgcgtgacatcgtcgctaagcaaaacgatgaagttgcctcgaagattaaagagatcatggagaaaggtgaactcgttccagatgaactgggtaatgcggtagtaacgatgcgcctgtcggagaaagactgcgaaaaaggctttattttggatggtttcccgcgtaccgtgcgccaagcggaatatctggatagttttcttgaaagccagaatcgccagttgacagccgccgtgctgattaaggtccccgaagatgaagttgttcagcgtctgctgtctcgcctgatctgtccgaaatgcgggcgtatctacaacatgattacgctgccaccaaaagaagacgagctgtgtgacgattgcggtgtcggcttagtacagcgtttagatgataaggaagaaacggtccgtcaccgcctgaaagtctaccatgagaagacccagccggtcattgactattatagtaagaaaggtattctcaaacgcgtagatgggagccaaggaatcgacaacgttgtggcagaagtcctggggattctgggttggagcgataag

SEQ ID NO: 1366 - protein, 231 aa, synthetic construct
  REGION 1..231: note = variant of adenylate kinase from Thermotoga neapolitana
MHHHHHHGGSGMGAYLVFLGPPGAGKGTQGRIISAKTGIPHISTGDILRDIVAKQNDEVASKIKEIMEKGELVPDELGNAVVTMRLSEKDCEKGFILDGFPRTVRQAEYLDSFLESQNRQLTAAVLIKVPEDEVVQRLLSRLICPKCGRIYNMITLPPKEDELCDDCGVGLVQRLDDKEETVRHRLKVYHEKTQPVIDYYSKKGILKRVDGSQGIDNVVAEVLGILGWSDK

SEQ ID NO: 1367 - DNA, 693 bp, synthetic construct
  misc_feature 1..693: note = variant of adenylate kinase from Thermotoga neapolitana
  source 1..693: mol_type = other DNA
atgcaccatcatcaccatcacgggggctccggcatgggggcatatctggtgttcttaggtccgccgggcgcgggaaaaggtacccaaggccgtattatttcggcaaagactggcatcccgcatattagcacgggcgatatcctgcgtgacatcgtcgctaagcaaaacgatgaagttgcctcgagcattaaagagatcatggagaaaggtgaactcgttccagatgaactgggtaatgcggtagtaaaacgccgcctgtcggagaaagactgcgaaaaaggctttattttggatggtttcccgcgtaccgtgcgccaagcggaatatctggatagttttcttgaaagccagaatcgccagttgacagccgccgtgctgattgaggtccccgaagatgaagttaaacagcgtctgctgtctcgcctgatctgtccgaaatgcgggcgtatctacaacatgatttttctgccaccaaaagaagacgagctgtgtgacgattgcggtgtcggcttagtacagcgtttagatgataaggaagaaacggtccgtcaccgcctgaaagtctaccatgagaagacccagccggtcattgactattatagtaagaaaggtattctcaaacgcgtagatgggagccaaggaatcgacaacgttgtggcagaagtcctggggattctgggttggagcgataag

SEQ ID NO: 1368 - protein, 231 aa, synthetic construct
  REGION 1..231: note = variant of adenylate kinase from Thermotoga neapolitana
MHHHHHHGGSGMGAYLVFLGPPGAGKGTQGRIISAKTGIPHISTGDILRDIVAKQNDEVASSIKEIMEKGELVPDELGNAVVKRRLSEKDCEKGFILDGFPRTVRQAEYLDSFLESQNRQLTAAVLIEVPEDEVKQRLLSRLICPKCGRIYNMIFLPPKEDELCDDCGVGLVQRLDDKEETVRHRLKVYHEKTQPVIDYYSKKGILKRVDGSQGIDNVVAEVLGILGWSDK

SEQ ID NO: 1369 - DNA, 693 bp, synthetic construct
  misc_feature 1..693: note = variant of adenylate kinase from Thermotoga neapolitana
  source 1..693: mol_type = other DNA
atgcaccatcatcaccatcacgggggctccggcatgggggcatatctggtgttcttaggtccgccgggcgcgggaaaaggtacccaaggccgtattatttcggcaaagactggcatcccgcatattagcacgggcgatatcctgcgtgacatcgtcgctaaacagaacgatgaagttgcctcgaaaattaaagagatcatggagaaaggtgaactcgttccagatgaactgggtaatgcggtagtaaaacgccgcctgtcggagaaagactgcgaaaaaggctttattttggatggtttcccgcgtaccgtgcgccaagcggaatatctggatagttttcttgaaagccagaatcgccagttgacagccgccgtgctgattaaagtccccgaagatgaagttgttcagcgtctgctgtctcgcctgatctgtccgaaatgcgggcgtatctacaacatgatttttctgccaccaaaagaagacgagctgtgtgacgattgcggtgtcggcttagtacagcgtttagatgataaggaagaaacggtccgtcaccgcctgaaagtctaccttgagaagacccagccggtcattgactattatagtaagaaaggtattctcaaacgcgtagatgggtcgcaaggaatcgacaacgttgtggcagaagtcctgggggctctgggttggagcgataag

SEQ ID NO: 1370 - protein, 231 aa, synthetic construct
  REGION 1..231: note = variant of adenylate kinase from Thermotoga neapolitana
MHHHHHHGGSGMGAYLVFLGPPGAGKGTQGRIISAKTGIPHISTGDILRDIVAKQNDEVASKIKEIMEKGELVPDELGNAVVKRRLSEKDCEKGFILDGFPRTVRQAEYLDSFLESQNRQLTAAVLIKVPEDEVVQRLLSRLICPKCGRIYNMIFLPPKEDELCDDCGVGLVQRLDDKEETVRHRLKVYLEKTQPVIDYYSKKGILKRVDGSQGIDNVVAEVLGALGWSDK

SEQ ID NO: 1371 - DNA, 693 bp, synthetic construct
  misc_feature 1..693: note = variant of adenylate kinase from Thermotoga neapolitana
  source 1..693: mol_type = other DNA
atgcaccatcatcaccatcacgggggctccggcatgggggcatatctggtgttcttaggtccgccgggcgcgggaaaaggtacccaaggccgtattatttcggcaaagactggcatcccgcatattagcacgggcgatatcctgcgtgacatcgtcgctaagcaaaacgatgaagttgcctcgaagattaaagagatcatggagaaaggtgaactcgttccagatgaactgggtaatgcggtagtaaagatgcgcctgtcggagaaagactgcgaaaaaggctttattttggatggtttcccgcgtaccgtgcgccaagcggaatatctggatagttttcttgaaagccagaatcgccagttgacagccgccgtgctgattaaagtccccgaagatgaagttgttcagcgtctgctgtctcgcctgatctgtccgaaatgcgggcgtatctacaacatgattacgctgccaccaaaagaagacgagctgtgtgacgattgcggtgtcggcttagtacagcgtttagatgataaggaagaaacggtccgtcaccgcctgaaagtctaccgtgagaagacccagccggtcattgactattatagtaagaaaggtattctcaaacgcgtagatgggtcgcaaggaatcgacaacgttgtggcagaagtcctggggattctgggttggagcgataag

SEQ ID NO: 1372 - protein, 231 aa, synthetic construct
  REGION 1..231: note = variant of adenylate kinase from Thermotoga neapolitana
MHHHHHHGGSGMGAYLVFLGPPGAGKGTQGRIISAKTGIPHISTGDILRDIVAKQNDEVASKIKEIMEKGELVPDELGNAVVKMRLSEKDCEKGFILDGFPRTVRQAEYLDSFLESQNRQLTAAVLIKVPEDEVVQRLLSRLICPKCGRIYNMITLPPKEDELCDDCGVGLVQRLDDKEETVRHRLKVYREKTQPVIDYYSKKGILKRVDGSQGIDNVVAEVLGILGWSDK

SEQ ID NO: 1373 - DNA, 693 bp, synthetic construct
  misc_feature 1..693: note = variant of adenylate kinase from Thermotoga neapolitana
  source 1..693: mol_type = other DNA
atgcaccatcatcaccatcacgggggctccggcatgggggcatatctggtgttcttaggtccgccgggcgcgggaaaaggtacccaaggccgtattatttcggcaaagactggcatcccgcatattagcacgggcgatatcctgcgtgacatcgtcgctaagcaaaacgatgaagttgcctcgaagattaaagagatcatggagaaaggtgaactcgttccagatgaactgggtaatgcggtagtaaagcgtcgcctgtcggagaaagactgcgaaaaaggctttattttggatggtttcccgcgtaccgtgcgccaagcggaatatctggatagttttcttgaaagccagaatcgccagttgacagccgccgtgctgattgaggtccccgaagatgaagttgttcagcgtctgctgtctcgcctgatctgtccgaaatgcgggcgtatctacaacatgatttttctgccaccaaaagaagacgagctgtgtgacgattgcggtgtcggcttagtacagcgtttagatgataaggaagaaacggtccgtcaccgcctgaaagtctaccgtgagaagacccagccggtcattgactattatagtaagaaaggtattctcaaacgcgtagatgggtcgcaaggaatcgacaacgttgtggcagaagtcctggggattctgggttggagcgataag

SEQ ID NO: 1374 - protein, 231 aa, synthetic construct
  REGION 1..231: note = variant of adenylate kinase from Thermotoga neapolitana
MHHHHHHGGSGMGAYLVFLGPPGAGKGTQGRIISAKTGIPHISTGDILRDIVAKQNDEVASKIKEIMEKGELVPDELGNAVVKRRLSEKDCEKGFILDGFPRTVRQAEYLDSFLESQNRQLTAAVLIEVPEDEVVQRLLSRLICPKCGRIYNMIFLPPKEDELCDDCGVGLVQRLDDKEETVRHRLKVYREKTQPVIDYYSKKGILKRVDGSQGIDNVVAEVLGILGWSDK

SEQ ID NO: 1375 - DNA, 693 bp, synthetic construct
  misc_feature 1..693: note = variant of adenylate kinase from Thermotoga neapolitana
  source 1..693: mol_type = other DNA
atgcaccatcatcaccatcacgggggctccggcatgggggcatatctggtgttcttaggtccgccgggcgcgggaaaaggtacccaaggccgtattatttcggcaaagactggcatcccgcatattagcacgggcgatatcctgcgtgacatcgtcgctaagcaaaacgatgaagttgcctcgaagattaaagagatcatggagaaaggtgaactcgttccagatgaactgggtaatgcggtagtaaaacgccgcctgtcggagaaagactgcgaaaaaggctttattttggatggtttcccgcgtaccgtgcgccaagcggaatatctggatagttttcttgaaagccagaatcgccagttgacagccgccgtgctgattaaggtccccgaagatgaagttgttcagcgtctgctgtctcgcctgatctgtccgaaatgcgggcgtatctacaacatgatttttctgccaccaaaagaagacgagctgtgtgacgattgcggtgtcggcttagtacagcgtttagatgataaggaagaaacggtccgtcaccgcctgaaagtctaccgtgagaagacccagccggtcattgactattatagtaagaaaggtattctcaaacgcgtagatgggaaccaaggaatcgacaacgttgtggcagaagtcctggggattctgggttggagcgataag

SEQ ID NO: 1376 - protein, 231 aa, synthetic construct
  REGION 1..231: note = variant of adenylate kinase from Thermotoga neapolitana
MHHHHHHGGSGMGAYLVFLGPPGAGKGTQGRIISAKTGIPHISTGDILRDIVAKQNDEVASKIKEIMEKGELVPDELGNAVVKRRLSEKDCEKGFILDGFPRTVRQAEYLDSFLESQNRQLTAAVLIKVPEDEVVQRLLSRLICPKCGRIYNMIFLPPKEDELCDDCGVGLVQRLDDKEETVRHRLKVYREKTQPVIDYYSKKGILKRVDGNQGIDNVVAEVLGILGWSDK

SEQ ID NO: 1377 - DNA, 693 bp, synthetic construct
  misc_feature 1..693: note = variant of adenylate kinase from Thermotoga neapolitana
  source 1..693: mol_type = other DNA
atgcaccatcatcaccatcacgggggctccggcatgggggcatatctggtgttcttaggtccgccgggcgcgggaaaaggtacccaaggccgtattatttcggcaaagactggcatcccgcatattagcacgggcgatatcctgcgtgacatcgtcgctaagcaaaacgatgaagttgcctcgaagattaaagagatcatggagaaaggtgaactcgttccagatgaactgggtaatgcggtagtaacgatgcgcctgtcggagaaagactgcgaaaaaggctttattttggatggtttcccgcgtaccgtgcgccaagcggaatatctggatagttttcttgaaagccagaatcgccagttgacagccgccgtgctgattaaagtccccgaagatgaagttgttcagcgtctgctgtctcgcctgatctgtccgaaatgcgggcgtatctacaacatgattacgctgccaccaaaagaagacgagctgtgtgacgattgcggtgtcggcttagtacagcgtttagatgataaggaagaaacggtccgtcaccgcctgaaagtctaccttgagaagacccagccggtcattgactattatagtaagaaaggtattctcaaacgcgtagatgggtcgcaaggaatcgacaacgttgtggcagaagtcctggggattctgggttggagcgataag

SEQ ID NO: 1378 - protein, 231 aa, synthetic construct
  REGION 1..231: note = variant of adenylate kinase from Thermotoga neapolitana
MHHHHHHGGSGMGAYLVFLGPPGAGKGTQGRIISAKTGIPHISTGDILRDIVAKQNDEVASKIKEIMEKGELVPDELGNAVVTMRLSEKDCEKGFILDGFPRTVRQAEYLDSFLESQNRQLTAAVLIKVPEDEVVQRLLSRLICPKCGRIYNMITLPPKEDELCDDCGVGLVQRLDDKEETVRHRLKVYLEKTQPVIDYYSKKGILKRVDGSQGIDNVVAEVLGILGWSDK

SEQ ID NO: 1379 - DNA, 693 bp, synthetic construct
  misc_feature 1..693: note = variant of adenylate kinase from Thermotoga neapolitana
  source 1..693: mol_type = other DNA
atgcaccatcatcaccatcacgggggctccggcatgggggcatatctggtgttcttaggtccgccgggcgcgggaaaaggtacccaaggccgtattatttcggcaaagactggcatcccgcatattagcacgggcgatatcctgcgtgacatcgtcgctacacagaacgatgaagttgcctcgaaaattaaagagatcatggagaaaggtgaactcgttccagatgaactgggtaatgctgtagtaaaacgccgcctgtcggagaaagactgcgaaaaaggctttattttggatggtttcccgcgtaccgtgcgccaagcggaatatctggatagttttcttgaaagccagaatcgccagttgacagccgccgtgctgattaaagtccccgaagatgaagttgttcagcgtctgctgtctcgcctgatctgtccgaaatgcgggcgtatctacaacatgatttttctgccaccaaaagaagacgagctgtgtgacgattgcggtgtcggcttagtacagcgtttagatgataaggaagaaacggtccgtcaccgcctgaaagtctaccttgagaagacccagccggtcattgactattatagtaagaaaggtattctcaaagaagtagatgggtcgcaaggaatcgacaacgttgtggcagaagtcctgggggctctgggttggagcgataag

SEQ ID NO: 1380 - protein, 231 aa, synthetic construct
  REGION 1..231: note = variant of adenylate kinase from Thermotoga neapolitana
MHHHHHHGGSGMGAYLVFLGPPGAGKGTQGRIISAKTGIPHISTGDILRDIVATQNDEVASKIKEIMEKGELVPDELGNAVVKRRLSEKDCEKGFILDGFPRTVRQAEYLDSFLESQNRQLTAAVLIKVPEDEVVQRLLSRLICPKCGRIYNMIFLPPKEDELCDDCGVGLVQRLDDKEETVRHRLKVYLEKTQPVIDYYSKKGILKEVDGSQGIDNVVAEVLGALGWSDK

SEQ ID NO: 1381 - DNA, 693 bp, synthetic construct
  misc_feature 1..693: note = variant of adenylate kinase from Thermotoga neapolitana
  source 1..693: mol_type = other DNA
atgcaccatcatcaccatcacgggggctccggcatgggggcatatctggtgttcttaggtccgccgggcgcgggaaaaggtacccaaggccgtattatttcggcaaagactggcatcccgcatattagcacgggcgatatcctgcgtgacatcgtcgctaagcaaaacgatgaagttgcctcgaagattaaagagatcatggagaaaggtgaactcgttccagatgaactgggtaatgcggtagtaaagatgcgcctgtcggagaaagactgcgaaaaaggctttattttggatggtttcccgcgtaccgtgcgccaagcggaatatctggatagttttcttgaaagccagaatcgccagttgacagccgccgtgctgattaaggtccccgaagatgaagttgttcagcgtctgctgtctcgcctgatctgtccgaaatgcgggcgtatctacaacatgattacgctgccaccaaaagaagacgagctgtgtgacgattgcggtgtcggcttagtacagcgtttagatgataaggaagaaacggtccgtcaccgcctgaaagtctaccatgagaagacccagccggtcattgactattatagtaagaaaggtattctcaaacgcgtagatgggtcgcaaggaatcgacaacgttgtggcagaagtcctggggattctgggttggagcgataag

SEQ ID NO: 1382 - protein, 231 aa, synthetic construct
  REGION 1..231: note = variant of adenylate kinase from Thermotoga neapolitana
MHHHHHHGGSGMGAYLVFLGPPGAGKGTQGRIISAKTGIPHISTGDILRDIVAKQNDEVASKIKEIMEKGELVPDELGNAVVKMRLSEKDCEKGFILDGFPRTVRQAEYLDSFLESQNRQLTAAVLIKVPEDEVVQRLLSRLICPKCGRIYNMITLPPKEDELCDDCGVGLVQRLDDKEETVRHRLKVYHEKTQPVIDYYSKKGILKRVDGSQGIDNVVAEVLGILGWSDK

SEQ ID NO: 1383 - DNA, 693 bp, synthetic construct
  misc_feature 1..693: note = variant of adenylate kinase from Thermotoga neapolitana
  source 1..693: mol_type = other DNA
atgcaccatcatcaccatcacgggggctccggcatgggggcatatctggtgttcttaggtccgccgggcgcgggaaaaggtacccaaggccgtattatttcggcaaagactggcatcccgcatattagcacgggcgatatcctgcgtgacatcgtcgctaagcaaaacgatgaagttgcctcgaagattaaagagatcatggagaaaggtgaactcgttccagatgaactgggtaatgcggtagtaaagcatcgcctgtcggagaaagactgcgaaaaaggctttattttggatggtttcccgcgtaccgtgcgccaagcggaatatctggatagttttcttgaaagccagaatcgccagttgacagccgccgtgctgattaaggtccccgaagatgaagttgttcagcgtctgctgtctcgcctgatctgtccgaaatgcgggcgtatctacaacatgatttttctgccaccaaaagaagacgagctgtgtgacgattgcggtgtcggcttagtacagcgtttagatgataaggaagaaacggtccgtcaccgcctgaaagtctaccttgagaagacccagccggtcattgactattatagtaagaaaggtattctcaaacgcgtagatgggaaccaaggaatcgacaacgttgtggcagaagtcctggggattctgggttggagcgataag

SEQ ID NO: 1384 - protein, 231 aa, synthetic construct
  REGION 1..231: note = variant of adenylate kinase from Thermotoga neapolitana
MHHHHHHGGSGMGAYLVFLGPPGAGKGTQGRIISAKTGIPHISTGDILRDIVAKQNDEVASKIKEIMEKGELVPDELGNAVVKHRLSEKDCEKGFILDGFPRTVRQAEYLDSFLESQNRQLTAAVLIKVPEDEVVQRLLSRLICPKCGRIYNMIFLPPKEDELCDDCGVGLVQRLDDKEETVRHRLKVYLEKTQPVIDYYSKKGILKRVDGNQGIDNVVAEVLGILGWSDK

SEQ ID NO: 1385 - DNA, 693 bp, synthetic construct
  misc_feature 1..693: note = variant of adenylate kinase from Thermotoga neapolitana
  source 1..693: mol_type = other DNA
atgcaccatcatcaccatcacgggggctccggcatgggggcatatctggtgttcttaggtccgccgggcgcgggaaaaggtacccaaggccgtattatttcggcaaagactggcatcccgcatattagcacgggcgatatcctgcgtgacatcgtcgctaagcaaaacgatgaagttgcctcgaaaattaaagagatcatggagaaaggtgaactcgttccagatgaactgggtaatgcggtagtaaagatgcgcctgtcggagaaagactgcgaaaaaggctttattttggatggtttcccgcgtaccgtgcgccaagcggaatatctggatagttttcttgaaagccagaatcgccagttgacatccgccgtgctgattaaggtccccgaagatgaagttgttcagcgtctgctgtctcgcctgatctgtccgaaatgcgggcgtatctacaacatgattacgctgccaccaaaagaagacgagctgtgtgacgattgcggtgtcggcttagtacagcgtttagatgataaggaagaaacggtccgtcaccgcctgaaagtctaccttgagaagacccagccggtcattgactattatagtaagaaaggtattctcaaacgcgtagatgggaaccaaggaatcgacaacgttgtggcagaagtcctggggattctgggttggagcgataag

SEQ ID NO: 1386 - protein, 231 aa, synthetic construct
  REGION 1..231: note = variant of adenylate kinase from Thermotoga neapolitana
MHHHHHHGGSGMGAYLVFLGPPGAGKGTQGRIISAKTGIPHISTGDILRDIVAKQNDEVASKIKEIMEKGELVPDELGNAVVKMRLSEKDCEKGFILDGFPRTVRQAEYLDSFLESQNRQLTSAVLIKVPEDEVVQRLLSRLICPKCGRIYNMITLPPKEDELCDDCGVGLVQRLDDKEETVRHRLKVYLEKTQPVIDYYSKKGILKRVDGNQGIDNVVAEVLGILGWSDK

SEQ ID NO: 1387 - DNA, 693 bp, synthetic construct
  misc_feature 1..693: note = variant of adenylate kinase from Thermotoga neapolitana
  source 1..693: mol_type = other DNA
atgcaccatcatcaccatcacgggggctccggcatgggggcatatctggtgttcttaggtccgccgggcgcgggaaaaggtacccaaggccgtattatttcggcaaagactggcatcccgcatattagcacgggcgatatcctgcgtgacatcgtcgctaagcaaaacgatgaagttgcctcgagcattaaagagatcatggagaaaggtgaactcgttccagatgaactgggtaatgcggtagtaaaacgccgcctgtcggagaaagactgcgaaaaaggctttattttggatggtttcccgcgtaccgtgcgccaagcggaatatctggatagttttcttgaaagccagaatcgccagttgacagccgccgtgctgattgaggtccccgaagatgaagttgttcagcgtctgctgtctcgcctgatctgtccgaaatgcgggcgtatctacaacatgatttttctgccaccaaaagaagacgagctgtgtgacgattgcggtgtcggcttagtacagcgtttagatgataaggaagaaacggtccgtcaccgcctgaaagtctaccgtgagaagacccagccggtcattgactattatagtaagaaaggtattctcaaacgcgtagatgggtcgcaaggaatcgacaacgttgtggcagaagtcctggggattctgggttggagcgataag

SEQ ID NO: 1388 - protein, 231 aa, synthetic construct
  REGION 1..231: note = variant of adenylate kinase from Thermotoga neapolitana
MHHHHHHGGSGMGAYLVFLGPPGAGKGTQGRIISAKTGIPHISTGDILRDIVAKQNDEVASSIKEIMEKGELVPDELGNAVVKRRLSEKDCEKGFILDGFPRTVRQAEYLDSFLESQNRQLTAAVLIEVPEDEVVQRLLSRLICPKCGRIYNMIFLPPKEDELCDDCGVGLVQRLDDKEETVRHRLKVYREKTQPVIDYYSKKGILKRVDGSQGIDNVVAEVLGILGWSDK

SEQ ID NO: 1389 - DNA, 693 bp, synthetic construct
  misc_feature 1..693: note = variant of adenylate kinase from Thermotoga neapolitana
  source 1..693: mol_type = other DNA
atgcaccatcatcaccatcacgggggctccggcatgggggcatatctggtgttcttaggtccgccgggcgcgggaaaaggtacccaaggccgtattatttcggcaaagactggcatcccgcatattagcacgggcgatatcctgcgtgacatcgtcgctaaaagcaacgatgaagttgcctcgaaaattaaagagatcatggagaaaggtgaactcgttccagatgaactgggtaatgatgtagtaaaacgccgcctgtcggagaaagactgcgaaaaaggctttattttggatggtttcccgcgtaccgtgcgccaagcggaatatctggatagttttcttgaaagccagaatcgccagttgacagccgccgtgctgattaaagtccccgaagatgaagttgttcagcgtctgctgtctcgcctgatctgtccgaaatgcgggcgtatctacaacatgatttttctgccaccaaaagaagacgagctgtgtgacgattgcggtgtcggcttagtacagcgtttagatgataaggaagaaacggtccgtcaccgcctgaaagtctaccttgagaagacccagccggtcattgactattatagtaagaaaggtattctcaaagaagtagatgggtcgcaaggaatcgacaacgttgtggcagaagtcctgggggctctgggttggagcgataag

SEQ ID NO: 1390 - protein, 231 aa, synthetic construct
  REGION 1..231: note = variant of adenylate kinase from Thermotoga neapolitana
MHHHHHHGGSGMGAYLVFLGPPGAGKGTQGRIISAKTGIPHISTGDILRDIVAKSNDEVASKIKEIMEKGELVPDELGNDVVKRRLSEKDCEKGFILDGFPRTVRQAEYLDSFLESQNRQLTAAVLIKVPEDEVVQRLLSRLICPKCGRIYNMIFLPPKEDELCDDCGVGLVQRLDDKEETVRHRLKVYLEKTQPVIDYYSKKGILKEVDGSQGIDNVVAEVLGALGWSDK

SEQ ID NO: 1391 - DNA, 693 bp, synthetic construct
  misc_feature 1..693: note = variant of adenylate kinase from Thermotoga neapolitana
  source 1..693: mol_type = other DNA
atgcaccatcatcaccatcacgggggctccggcatgggggcatatctggtgttcttaggtccgccgggcgcgggaaaaggtacccaaggccgtattatttcggcaaagactggcatcccgcatattagcacgggcgatatcctgcgtgacatcgtcgctaagcaaaacgatgaagttgcctcgaagattaaagagatcatggagaaaggtgaactcgttccagatgaactgggtaatgcggtagtaaagcgtcgcctgtcggagaaagactgcgaaaaaggctttattttggatggtttcccgcgtaccgtgcgccaagcggaatatctggatagttttcttgaaagccagaatcgccagttgacagccgccgtgctgattaaggtccccgaagatgaagttgttcagcgtctgctgtctcgcctgatctgtccgaaatgcgggcgtatctacaacatgattacgctgccaccaaaagaagacgagctgtgtgacgattgcggtgtcggcttagtacagcgtttagatgataaggaagaaacggtccgtcaccgcctgaaagtctaccgtgagaagacccagccggtcattgactattatagtaagaaaggtattctcaaacgcgtagatgggagccaaggaatcgacaacgttgtggcagaagtcctggggattctgggttggagcgataag

SEQ ID NO: 1392 - protein, 231 aa, synthetic construct
  REGION 1..231: note = variant of adenylate kinase from Thermotoga neapolitana
MHHHHHHGGSGMGAYLVFLGPPGAGKGTQGRIISAKTGIPHISTGDILRDIVAKQNDEVASKIKEIMEKGELVPDELGNAVVKRRLSEKDCEKGFILDGFPRTVRQAEYLDSFLESQNRQLTAAVLIKVPEDEVVQRLLSRLICPKCGRIYNMITLPPKEDELCDDCGVGLVQRLDDKEETVRHRLKVYREKTQPVIDYYSKKGILKRVDGSQGIDNVVAEVLGILGWSDK

SEQ ID NO: 1393 - DNA, 693 bp, synthetic construct
  misc_feature 1..693: note = variant of adenylate kinase from Thermotoga neapolitana
  source 1..693: mol_type = other DNA
atgcaccatcatcaccatcacgggggctccggcatgggggcatatctggtgttcttaggtccgcctggcgcgggaaaaggtacccaaggccgtattatttcggcaaagactggcatcccgcatattagcacgggcgatatcctgcgtgacatcgtcgctaagcaaaacgatgaagttgcctcgaaaattaaagagatcatggagaaaggtgaactcgttccagatgaactgggtaatgcggtagtaacgatgcgcctgtcggagaaagactgcgaaaaaggctttattttggatggtttcccgcgtaccgtgcgccaagcggaatatctggatagttttcttgaaagccagaatcgccagttgacagccgccgtgctgattaaagtccccgaagatgaagttgttcagcgtctgctgtctcgcctgatctgtccgaaatgcgggcgtatctacaacatgatttttctgccaccaaaagaagacgagctgtgtgacgattgcggtgtcggcttagtacagcgtttagatgataaggaagaaacggtccgtcaccgcctgaaagtctaccgtgagaagacccagccggtcattgactattatagtaagaaaggtattctcaaacgcgtagatgggaaccaaggaatcgacaacgttgtggcagaagtcctggggattctgggttggagcgataag

SEQ ID NO: 1394 - protein, 231 aa, synthetic construct
  REGION 1..231: note = variant of adenylate kinase from Thermotoga neapolitana
MHHHHHHGGSGMGAYLVFLGPPGAGKGTQGRIISAKTGIPHISTGDILRDIVAKQNDEVASKIKEIMEKGELVPDELGNAVVTMRLSEKDCEKGFILDGFPRTVRQAEYLDSFLESQNRQLTAAVLIKVPEDEVVQRLLSRLICPKCGRIYNMIFLPPKEDELCDDCGVGLVQRLDDKEETVRHRLKVYREKTQPVIDYYSKKGILKRVDGNQGIDNVVAEVLGILGWSDK

SEQ ID NO: 1395 - DNA, 693 bp, synthetic construct
  misc_feature 1..693: note = variant of adenylate kinase from Thermotoga neapolitana
  source 1..693: mol_type = other DNA
atgcaccatcatcaccatcacgggggctccggcatgggggcatatctggtgttcttaggtccgccgggcgcgggaaaaggtacccaaggccgtattatttcggcaaagactggcatcccgcatattagcacgggcgatatcctgcgtgacatcgtcgctaagcaaaacgatgaagttgcctcgaagattaaagagatcatggagaaaggtgaactcgttccagatgaactgggtaatgcggtagtaacgcgtcgcctgtcggagaaagactgcgaaaaaggctttattttggatggtttcccgcgtaccgtgcgccaagcggaatatctggatagttttcttgaaagccagaatcgccagttgacagccgccgtgctgattgaggtccccgaagatgaagttgttcagcgtctgctgtctcgcctgatctgtccgaaatgcgggcgtatctacaacatgattacgctgccaccaaaagaagacgagctgtgtgacgattgcggtgtcggcttagtacagcgtttagatgataaggaagaaacggtccgtcaccgcctgaaagtctaccatgagaagacccagccggtcattgactattatagtaagaaaggtattctcaaacgcgtagatgggaaccaaggaatcgacaacgttgtggcagaagtcctggggattctgggttggagcgataag

SEQ ID NO: 1396 - protein, 231 aa, synthetic construct
  REGION 1..231: note = variant of adenylate kinase from Thermotoga neapolitana
MHHHHHHGGSGMGAYLVFLGPPGAGKGTQGRIISAKTGIPHISTGDILRDIVAKQNDEVASKIKEIMEKGELVPDELGNAVVTRRLSEKDCEKGFILDGFPRTVRQAEYLDSFLESQNRQLTAAVLIEVPEDEVVQRLLSRLICPKCGRIYNMITLPPKEDELCDDCGVGLVQRLDDKEETVRHRLKVYHEKTQPVIDYYSKKGILKRVDGNQGIDNVVAEVLGILGWSDK

SEQ ID NO: 1397 - DNA, 693 bp, synthetic construct
  misc_feature 1..693: note = variant of adenylate kinase from Thermotoga neapolitana
  source 1..693: mol_type = other DNA
atgcaccatcatcaccatcacgggggctccggcatgggggcatatctggtgttcttaggtccgccgggcgcgggaaaaggtacccaaggccgtattatttcggcaaagactggcatcccgcatattagcacgggcgatatcctgcgtgacatcgtcgctaaaagcaacgatgaagttgcctcgaaaattaaagagatcatggagaaaggtgaactcgttccagatgaactgggtaatgctgtagtaaaacgccgcctgtcggagaaagactgcgaaaaaggctttattttggatggtttcccgcgtaccgtgcgccaagcggaatatctggatagttttcttgaaagccagaatcgccagttgacagccgccgtgctgattaaagtccccgaagatgaagttgttcagcgtctgctgtctcgcctgatctgtccgaaatgcgggcgtatctacaacatgatttttctgccaccaaaagaagacgagctgtgtgacgattgcggtgtcggcttagtacagcgtttagatgataaggaacatacggtccgtcaccgcctgaaagtctaccttgagaagacccagccggtcattgactattatagtaagaaaggtattctcaaacgcgtagatgggtcgcaaggaatcgacaacgttgtggcagaagtcctgggggctctgggttggagcgataag

SEQ ID NO: 1398 - protein, 231 aa, synthetic construct
  REGION 1..231: note = variant of adenylate kinase from Thermotoga neapolitana
MHHHHHHGGSGMGAYLVFLGPPGAGKGTQGRIISAKTGIPHISTGDILRDIVAKSNDEVASKIKEIMEKGELVPDELGNAVVKRRLSEKDCEKGFILDGFPRTVRQAEYLDSFLESQNRQLTAAVLIKVPEDEVVQRLLSRLICPKCGRIYNMIFLPPKEDELCDDCGVGLVQRLDDKEHTVRHRLKVYLEKTQPVIDYYSKKGILKRVDGSQGIDNVVAEVLGALGWSDK

SEQ ID NO: 1399 - DNA, 693 bp, synthetic construct
  misc_feature 1..693: note = variant of adenylate kinase from Thermotoga neapolitana
  source 1..693: mol_type = other DNA
atgcaccatcatcaccatcacgggggctccggcatgggggcatatctggtgttcttaggtccgccgggcgcgggaaaaggtacccaaggccgtattatttcggcaaagactggcatcccgcatattagcacgggcgatatcctgcgtgacatcgtcgctaagcaaaacgatgaagttgcctcgaagattaaagagatcatggagaaaggtgaactcgttccagatgaactgggtaatgcggtagtaaagatgcgcctgtcggagaaagactgcgaaaaaggctttattttggatggtttcccgcgtaccgtgcgccaagcggaatatctggatagttttcttgaaagccagaatcgccagttgacagccgccgtgctgattaaggtccccgaagatgaagttgttcagcgtctgctgtctcgcctgatctgtccgaaatgcgggcgtatctacaacatgatttttctgccaccaaaagaagacgagctgtgtgacgattgcggtgtcggcttagtacagcgtttagatgataaggaagaaacggtccgtcaccgcctgaaagtctaccgtgagaagacccagccggtcattgactattatagtaagaaaggtattctcaaacgcgtagatgggaaccaaggaatcgacaacgttgtggcagaagtcctggggattctgggttggagcgataag

SEQ ID NO: 1400 - protein, 231 aa, synthetic construct
  REGION 1..231: note = variant of adenylate kinase from Thermotoga neapolitana
MHHHHHHGGSGMGAYLVFLGPPGAGKGTQGRIISAKTGIPHISTGDILRDIVAKQNDEVASKIKEIMEKGELVPDELGNAVVKMRLSEKDCEKGFILDGFPRTVRQAEYLDSFLESQNRQLTAAVLIKVPEDEVVQRLLSRLICPKCGRIYNMIFLPPKEDELCDDCGVGLVQRLDDKEETVRHRLKVYREKTQPVIDYYSKKGILKRVDGNQGIDNVVAEVLGILGWSDK

SEQ ID NO: 1401 - DNA, 693 bp, synthetic construct
  misc_feature 1..693: note = variant of adenylate kinase from Thermotoga neapolitana
  source 1..693: mol_type = other DNA
atgcaccatcatcaccatcacgggggctccggcatgggggcatatctggtgttcttaggtccgccgggcgcgggaaaaggtacccaaggccgtattatttcggcaaagactggcatcccgcatattagcacgggcgatatcctgcgtgacatcgtcgctacacagaacgatgaagttgcctcgaaaattaaagagatcatggagaaaggtgaactcgttccagatgaactgggtaatgatgtagtaaaacgccgcctgtcggagaaagactgcgaaaaaggctttattttggatggtttcccgcgtaccgtgcgccaagcggaatatctggatagttttcttgaaagccagaatcgccagttgacagccgccgtgctgattaaagtccccgaagatgaagttgttcagcgtctgctgtctcgcctgatctgtccgaaatgcgggcgtatctacaacatgatttttctgccaccaaaagaagacgagctgtgtgacgattgcggtgtcggcttagtacagcgtttagatgataaggaacatacggtccgtcaccgcctgaaagtctaccttgagaagacccagccggtcattgactattatagtaagaaaggtattctcaaagaagtagatgggtcgcaaggaatcgacaacgttgtggcagaagtcctgggggctctgggttggagcgataag

SEQ ID NO: 1402 - protein, 231 aa, synthetic construct
  REGION 1..231: note = variant of adenylate kinase from Thermotoga neapolitana
MHHHHHHGGSGMGAYLVFLGPPGAGKGTQGRIISAKTGIPHISTGDILRDIVATQNDEVASKIKEIMEKGELVPDELGNDVVKRRLSEKDCEKGFILDGFPRTVRQAEYLDSFLESQNRQLTAAVLIKVPEDEVVQRLLSRLICPKCGRIYNMIFLPPKEDELCDDCGVGLVQRLDDKEHTVRHRLKVYLEKTQPVIDYYSKKGILKEVDGSQGIDNVVAEVLGALGWSDK

SEQ ID NO: 1403 - DNA, 693 bp, synthetic construct
  misc_feature 1..693: note = variant of adenylate kinase from Thermotoga neapolitana
  source 1..693: mol_type = other DNA
atgcaccatcatcaccatcacgggggctccggcatgggggcatatctggtgttcttaggtccgccgggcgcgggaaaaggtacccaaggccgtattatttcggcaaagactggcatcccgcatattagcacgggcgatatcctgcgtgacatcgtcgctaaacagaacgatgaagttgcctcgaaaattaaagagatcatggagaaaggtgaactcgttccagatgaactgggtaatgatgtagtaaaacgccgcctgtcggagaaagactgcgaaaaaggctttattttggatggtttcccgcgtaccgtgcgccaagcggaatatctggatagttttcttgaaagccagaatcgccagttgacagccgccgtgctgattaaagtccccgaagatgaagttgttcagcgtctgctgtctcgcctgatctgtccgaaatgcgggcgtatctacaacatgatttttctgccaccaaaagaagacgagctgtgtgacgattgcggtgtcggcttagtacagcgtttagatgataaggaagaaacggtccgtcaccgcctgaaagtctaccttgagaagacccagccggtcattgactattatagtaagaaaggtattctcaaagaagtagatgggtcgcaaggaatcgacaacgttgtggcagaagtcctggggattctgggttggagcgataag

SEQ ID NO: 1404 - protein, 231 aa, synthetic construct
  REGION 1..231: note = variant of adenylate kinase from Thermotoga neapolitana
MHHHHHHGGSGMGAYLVFLGPPGAGKGTQGRIISAKTGIPHISTGDILRDIVAKQNDEVASKIKEIMEKGELVPDELGNDVVKRRLSEKDCEKGFILDGFPRTVRQAEYLDSFLESQNRQLTAAVLIKVPEDEVVQRLLSRLICPKCGRIYNMIFLPPKEDELCDDCGVGLVQRLDDKEETVRHRLKVYLEKTQPVIDYYSKKGILKEVDGSQGIDNVVAEVLGILGWSDK

SEQ ID NO: 1405 - DNA, 693 bp, synthetic construct
  misc_feature 1..693: note = variant of adenylate kinase from Thermotoga neapolitana
  source 1..693: mol_type = other DNA
atgcaccatcatcaccatcacgggggctccggcatgggggcatatctggtgttcttaggtccgccgggcgcgggaaaaggtacccaaggccgtattatttcggcaaagactggcatcccgcatattagcacgggcgatatcctgcgtgacatcgtcgctaagcaaaacgatgaagttgcctcgaagattaaagagatcatggagaaaggtgaactcgttccagatgaactgggtaatgcggtagtaaaacgccgcctgtcggagaaagactgcgaaaaaggctttattttggatggtttcccgcgtaccgtgcgccaagcggaatatctggatagttttcttgaaagccagaatcgccagttgacagccgccgtgctgattaaggtccccgaagatgaagttaaacagcgtctgctgtctcgcctgatctgtccgaaatgcgggcgtatctacaacatgattacgctgccaccaaaagaagacgagctgtgtgacgattgcggtgtcggcttagtacagcgtttagatgataaggaagaaacggtccgtcaccgcctgaaagtctaccgtgagaagacccagccggtcattgactattatagtaagaaaggtattctcaaacgcgtagatgggagccaaggaatcgacaacgttgtggcagaagtcctggggattctgggttggagcgataag

SEQ ID NO: 1406 - protein, 231 aa, synthetic construct
  REGION 1..231: note = variant of adenylate kinase from Thermotoga neapolitana
MHHHHHHGGSGMGAYLVFLGPPGAGKGTQGRIISAKTGIPHISTGDILRDIVAKQNDEVASKIKEIMEKGELVPDELGNAVVKRRLSEKDCEKGFILDGFPRTVRQAEYLDSFLESQNRQLTAAVLIKVPEDEVKQRLLSRLICPKCGRIYNMITLPPKEDELCDDCGVGLVQRLDDKEETVRHRLKVYREKTQPVIDYYSKKGILKRVDGSQGIDNVVAEVLGILGWSDK

SEQ ID NO: 1407 - DNA, 693 bp, synthetic construct
  misc_feature 1..693: note = variant of adenylate kinase from Thermotoga neapolitana
  source 1..693: mol_type = other DNA
atgcaccatcatcaccatcacgggggctccggcatgggggcatatctggtgttcttaggtccgccgggcgcgggaaaaggtacccaaggccgtattatttcggcaaagactggcatcccgcatattagcacgggcgatatcctgcgtgacatcgtcgctaagcaaaacgatgaagttgcctcgaaaattaaagagatcatggagaaaggtgaactcgttccagatgaactgggtaatgcggtagtaaaacgccgcctgtcggagaaagactgcgaaaaaggctttattttggatggtttcccgcgtaccgtgcgccaagcggaatatctggatagttttcttgaaagccagaatcgccagttgacagccgccgtgctgattaaagtccccgaagatgaagttgttcagcgtctgctgtctcgcctgatctgtccgaaatgcgggcgtatctacaacatgatttttctgccaccaaaagaagacgagctgtgtgacgattgcggtgtcggcttagtacagcgtttagatgataaggaagaaacggtccgtcaccgcctgaaagtctaccttgagaagacccagccggtcattgactattatagtaagaaaggtattctcaaacgcgtagatgggaaccaaggaatcgacaacgttgtggcagaagtcctggggattctgggttggagcgataag

SEQ ID NO: 1408 - protein, 231 aa, synthetic construct
  REGION 1..231: note = variant of adenylate kinase from Thermotoga neapolitana
MHHHHHHGGSGMGAYLVFLGPPGAGKGTQGRIISAKTGIPHISTGDILRDIVAKQNDEVASKIKEIMEKGELVPDELGNAVVKRRLSEKDCEKGFILDGFPRTVRQAEYLDSFLESQNRQLTAAVLIKVPEDEVVQRLLSRLICPKCGRIYNMIFLPPKEDELCDDCGVGLVQRLDDKEETVRHRLKVYLEKTQPVIDYYSKKGILKRVDGNQGIDNVVAEVLGILGWSDK

SEQ ID NO: 1409 - DNA, 693 bp, synthetic construct
  misc_feature 1..693: note = variant of adenylate kinase from Thermotoga neapolitana
  source 1..693: mol_type = other DNA
atgcaccatcatcaccatcacgggggctccggcatgggggcatatctggtgttcttaggtccgccgggcgcgggaaaaggtacccaaggccgtattatttcggcaaagactggcatcccgcatattagcacgggcgatatcctgcgtgacatcgtcgctaaacagaacgatgaagttgcctcgaaaattaaagagatcatggagaaaggtgaactcgttccagatgaactgggtaatgatgtagtaaaacgccgcctgtcggagaaagactgcgaaaaaggctttattttggatggtttcccgcgtaccgtgcgccaagcggaatatctggatagttttcttgaaagccagaatcgccagttgacagccgccgtgctgattaaagtccccgaagatgaagttgttcagcgtctgctgtctcgcctgatctgtccgaaatgcgggcgtatctacaacatgatttttctgccaccaaaagaagacgagctgtgtgacgattgcggtgtcggcttagtacagcgtttagatgataaggaacatacggtccgtcaccgcctgaaagtctaccttgagaagacccagccggtcattgactattatagtaagaaaggtattctcaaagaagtagatgggtcgcaaggaatcgacaacgttgtggcagaagtcctggggattctgggttggagcgataag

SEQ ID NO: 1410 - protein, 231 aa, synthetic construct
  REGION 1..231: note = variant of adenylate kinase from Thermotoga neapolitana
MHHHHHHGGSGMGAYLVFLGPPGAGKGTQGRIISAKTGIPHISTGDILRDIVAKQNDEVASKIKEIMEKGELVPDELGNDVVKRRLSEKDCEKGFILDGFPRTVRQAEYLDSFLESQNRQLTAAVLIKVPEDEVVQRLLSRLICPKCGRIYNMIFLPPKEDELCDDCGVGLVQRLDDKEHTVRHRLKVYLEKTQPVIDYYSKKGILKEVDGSQGIDNVVAEVLGILGWSDK

SEQ ID NO: 1411 - DNA, 693 bp, synthetic construct
  misc_feature 1..693: note = variant of adenylate kinase from Thermotoga neapolitana
  source 1..693: mol_type = other DNA
atgcaccatcatcaccatcacgggggctccggcatgggggcatatctggtgttcttaggtccgccgggcgcgggaaaaggtacccaaggccgtattatttcggcaaagactggcatcccgcatattagcacgggcgatatcctgcgtgacatcgtcgctaagcaaaacgatgaagttgcctcgaagattaaagagatcatggagaaaggtgaactcgttccagatgaactgggtaatgcggtagtaaagcgtcgcctgtcggagaaagactgcgaaaaaggctttattttggatggtttcccgcgtaccgtgcgccaagcggaatatctggatagttttcttgaaagccagaatcgccagttgacagccgccgtgctgattgaggtccccgaagatgaagttaaacagcgtctgctgtctcgcctgatctgtccgaaatgcgggcgtatctacaacatgatttttctgccaccaaaagaagacgagctgtgtgacgattgcggtgtcggcttagtacagcgtttagatgataaggaagaaacggtccgtcaccgcctgaaagtctaccgtgagaagacccagccggtcattgactattatagtaagaaaggtattctcaaacgcgtagatgggaaccaaggaatcgacaacgttgtggcagaagtcctggggattctgggttggagcgataag

SEQ ID NO: 1412 - protein, 231 aa, synthetic construct
  REGION 1..231: note = variant of adenylate kinase from Thermotoga neapolitana
MHHHHHHGGSGMGAYLVFLGPPGAGKGTQGRIISAKTGIPHISTGDILRDIVAKQNDEVASKIKEIMEKGELVPDELGNAVVKRRLSEKDCEKGFILDGFPRTVRQAEYLDSFLESQNRQLTAAVLIEVPEDEVKQRLLSRLICPKCGRIYNMIFLPPKEDELCDDCGVGLVQRLDDKEETVRHRLKVYREKTQPVIDYYSKKGILKRVDGNQGIDNVVAEVLGILGWSDK

SEQ ID NO: 1413 - DNA, 693 bp, synthetic construct
  misc_feature 1..693: note = variant of adenylate kinase from Thermotoga neapolitana
  source 1..693: mol_type = other DNA
atgcaccatcatcaccatcacgggggctccggcatgggggcatatctggtgttcttaggtccgccgggcgcgggaaaaggtacccaaggccgtattatttcggcaaagactggcatcccgcatattagcacgggcgatatcctgcgtgacatcgtcgctaagcaaaacgatgaagttgcctcgaagattaaagagatcatggagaaaggtgaactcgttccagatgaactgggtaatgcggtagtaaaacgccgcctgtcggagaaagactgcgaaaaaggctttattttggatggtttcccgcgtaccgtgcgccaagcggaatatctggatagttttcttgaaagccagaatcgccagttgacagccgccgtgctgattgaggtccccgaagatgaagttgttcagcgtctgctgtctcgcctgatctgtccgaaatgcgggcgtatctacaacatgattacgctgccaccaaaagaagacgagctgtgtgacgattgcggtgtcggcttagtacagcgtttagatgataaggaagaaacggtccgtcaccgcctgaaagtctaccttgagaagacccagccggtcattgactattatagtaagaaaggtattctcaaacgcgtagatgggaaccaaggaatcgacaacgttgtggcagaagtcctggggattctgggttggagcgataag

SEQ ID NO: 1414 - protein, 231 aa, synthetic construct
  REGION 1..231: note = variant of adenylate kinase from Thermotoga neapolitana
MHHHHHHGGSGMGAYLVFLGPPGAGKGTQGRIISAKTGIPHISTGDILRDIVAKQNDEVASKIKEIMEKGELVPDELGNAVVKRRLSEKDCEKGFILDGFPRTVRQAEYLDSFLESQNRQLTAAVLIEVPEDEVVQRLLSRLICPKCGRIYNMITLPPKEDELCDDCGVGLVQRLDDKEETVRHRLKVYLEKTQPVIDYYSKKGILKRVDGNQGIDNVVAEVLGILGWSDK

SEQ ID NO: 1415 - DNA, 693 bp, synthetic construct
  misc_feature 1..693: note = variant of adenylate kinase from Thermotoga neapolitana
  source 1..693: mol_type = other DNA
atgcaccatcatcaccatcacgggggctccggcatgggggcatatctggtgttcttaggtccgccgggcgcgggaaaaggtacccaaggccgtattatttcggcaaagactggcatcccgcatattagcacgggcgatatcctgcgtgacatcgtcgctaaacagaacgatgaagttgcctcgaaaattaaagagatcatggagaaaggtgaactcgttccagatgaactgggtaatgatgtagtaaaacgccgcctgtcggagaaagactgcgaaaaaggctttattttggatggtttcccgcgtaccgtgcgccaagcggaatatctggatagttttcttgaaagccagaatcgccagttgacagccgccgtgctgattaaagtccccgaagatgaagttgttcagcgtctgctgtctcgcctgatctgtccgaaatgcgggcgtatctacaacatgatttttctgccaccaaaagaagacgagctgtgtgacgattgcggtgtcggcttagtacagcgtttagatgataaggaagaaacggtccgtcaccgcctgaaagtctaccttgagaagacccagccggtcattgactattatagtaagaaaggtattctcaaagaagtagatgggtcgcaaggaatcgacaacgttgtggcagaagtcctggggctgctgggttggagcgataag

SEQ ID NO: 1416 - protein, 231 aa, synthetic construct
  REGION 1..231: note = variant of adenylate kinase from Thermotoga neapolitana
MHHHHHHGGSGMGAYLVFLGPPGAGKGTQGRIISAKTGIPHISTGDILRDIVAKQNDEVASKIKEIMEKGELVPDELGNDVVKRRLSEKDCEKGFILDGFPRTVRQAEYLDSFLESQNRQLTAAVLIKVPEDEVVQRLLSRLICPKCGRIYNMIFLPPKEDELCDDCGVGLVQRLDDKEETVRHRLKVYLEKTQPVIDYYSKKGILKEVDGSQGIDNVVAEVLGLLGWSDK

SEQ ID NO: 1417 - DNA, 693 bp, synthetic construct
  misc_feature 1..693: note = variant of adenylate kinase from Thermotoga neapolitana
  source 1..693: mol_type = other DNA
atgcaccatcatcaccatcacgggggctccggcatgggggcatatctggtgttcttaggtccgccgggcgcgggaaaaggtacccaaggccgtattatttcggcaaagactggcatcccgcatattagcacgggcgatatcctgcgtgacatcgtcgctaagcaaaacgatgaagttgcctcgaagattaaagagatcatggagaaaggtgaactcgttccagatgaactgggtaatgcggtagtaacgcgtcgcctgtcggagaaagactgcgaaaaaggctttattttggatggtttcccgcgtaccgtgcgccaagcggaatatctggatagttttcttgaaagccagaatcgccagttgacagccgccgtgctgattaaggtccccgaagatgaagttgttcagcgtctgctgtctcgcctgatctgtccgaaatgcgggcgtatctacaacatgatttttctgccaccaaaagaagacgagctgtgtgacgattgcggtgtcggcttagtacagcgtttagatgataaggaagaaacggtccgtcaccgcctgaaagtctaccttgagaagacccagccggtcattgactattatagtaagaaaggtattctcaaacgcgtagatgggaaccaaggaatcgacaacgttgtggcagaagtcctggggattctgggttggagcgataag

SEQ ID NO: 1418 - protein, 231 aa, synthetic construct
  REGION 1..231: note = variant of adenylate kinase from Thermotoga neapolitana
MHHHHHHGGSGMGAYLVFLGPPGAGKGTQGRIISAKTGIPHISTGDILRDIVAKQNDEVASKIKEIMEKGELVPDELGNAVVTRRLSEKDCEKGFILDGFPRTVRQAEYLDSFLESQNRQLTAAVLIKVPEDEVVQRLLSRLICPKCGRIYNMIFLPPKEDELCDDCGVGLVQRLDDKEETVRHRLKVYLEKTQPVIDYYSKKGILKRVDGNQGIDNVVAEVLGILGWSDK

SEQ ID NO: 1419 - DNA, 693 bp, synthetic construct
  misc_feature 1..693: note = variant of adenylate kinase from Thermotoga neapolitana
  source 1..693: mol_type = other DNA
atgcaccatcatcaccatcacgggggctccggcatgggggcatatctggtgttcttaggtccgccgggcgcgggaaaaggtacccaaggccgtattatttcggcaaagactggcatcccgcatattagcacgggcgatatcctgcgtgacatcgtcgctaagcaaaacgatgaagttgcctcgagcattaaagagatcatggagaaaggtgaactcgttccagatgaactgggtaatgcggtagtaaagatgcgcctgtcggagaaagactgcgaaaaaggctttattttggatggtttcccgcgtaccgtgcgccaagcggaatatctggatagttttcttgaaagccagaatcgccagttgacagccgccgtgctgattaaggtccccgaagatgaagttgttcagcgtctgctgtctcgcctgatctgtccgaaatgcgggcgtatctacaacatgattacgctgccaccaaaagaagacgagctgtgtgacgattgcggtgtcggcttagtacagcgtttagatgataaggaagaaacggtccgtcaccgcctgaaagtctaccgtgagaagacccagccggtcattgactattatagtaagaaaggtattctcaaacgcgtagatgggagccaaggaatcgacaacgttgtggcagaagtcctggggattctgggttggagcgataag

SEQ ID NO: 1420 - protein, 231 aa, synthetic construct
  REGION 1..231: note = variant of adenylate kinase from Thermotoga neapolitana
MHHHHHHGGSGMGAYLVFLGPPGAGKGTQGRIISAKTGIPHISTGDILRDIVAKQNDEVASSIKEIMEKGELVPDELGNAVVKMRLSEKDCEKGFILDGFPRTVRQAEYLDSFLESQNRQLTAAVLIKVPEDEVVQRLLSRLICPKCGRIYNMITLPPKEDELCDDCGVGLVQRLDDKEETVRHRLKVYREKTQPVIDYYSKKGILKRVDGSQGIDNVVAEVLGILGWSDK

SEQ ID NO: 1421 - DNA, 693 bp, synthetic construct
  misc_feature 1..693: note = variant of adenylate kinase from Thermotoga neapolitana
  source 1..693: mol_type = other DNA
atgcaccatcatcaccatcacgggggctccggcatgggggcatatctggtgttcttaggtccgccgggcgcgggaaaaggtacccaaggccgtattatttcggcaaagactggcatcccgcatattagcacgggcgatatcctgcgtgacatcgtcgctacacagaacgatgaagttgcctcgaaaattaaagagatcatggagaaaggtgaactcgttccagatgaactgggtaatgcggtagtaaaacgccgcctgtcggagaaagactgcgaaaaaggctttattttggatggtttcccgcgtaccgtgcgccaagcggaatatctggatagttttcttgaaagccagaatcgccagttgacagccgccgtgctgattaaagtccccgaagatgaagttgttcagcgtctgctgtctcgcctgatctgtccgaaatgcgggcgtatctacaacatgatttttctgccaccaaaagaagacgagctgtgtgacgattgcggtgtcggcttagtacagcgtttagatgataaggtagaaacggtccgtcaccgcctgaaagtctaccttgagaagacccagccggtcattgactattatagtaagaaaggtattctcaaacgcgtagatgggtcgcaaggaatcgacaacgttgtggcagaagtcctgggggctctgggttggagcgataag

SEQ ID NO: 1422 - protein, 231 aa, synthetic construct
  REGION 1..231: note = variant of adenylate kinase from Thermotoga neapolitana
MHHHHHHGGSGMGAYLVFLGPPGAGKGTQGRIISAKTGIPHISTGDILRDIVATQNDEVASKIKEIMEKGELVPDELGNAVVKRRLSEKDCEKGFILDGFPRTVRQAEYLDSFLESQNRQLTAAVLIKVPEDEVVQRLLSRLICPKCGRIYNMIFLPPKEDELCDDCGVGLVQRLDDKVETVRHRLKVYLEKTQPVIDYYSKKGILKRVDGSQGIDNVVAEVLGALGWSDK

SEQ ID NO: 1423 - DNA, 693 bp, synthetic construct
  misc_feature 1..693: note = variant of adenylate kinase from Thermotoga neapolitana
  source 1..693: mol_type = other DNA
atgcaccatcatcaccatcacgggggctccggcatgggggcatatctggtgttcttaggtccgccgggcgcgggaaaaggtacccaaggccgtattatttcggcaaagactggcatcccgcatattagcacgggcgatatcctgcgtgacatcgtcgctaagcaaaacgatgaagttgcctcgaagattaaagagatcatggagaaaggtgaactcgttccagatgaactgggtaatgcggtagtaaagcatcgcctgtcggagaaagactgcgaaaaaggctttattttggatggtttcccgcgtaccgtgcgccaagcggaatatctggatagttttcttgaaagccagaatcgccagttgacagccgccgtgctgattaaagtccccgaagatgaagttgttcagcgtctgctgtctcgcctgatctgtccgaaatgcgggcgtatctacaacatgatttttctgccaccaaaagaagacgagctgtgtgacgattgcggtgtcggcttagtacagcgtttagatgataaggaagaaacggtccgtcaccgcctgaaagtctaccttgagaagacccagccggtcattgactattatagtaagaaaggtattctcaaacgcgtagatgggagccaaggaatcgacaacgttgtggcagaagtcctggggattctgggttggagcgataag

SEQ ID NO: 1424 - protein, 231 aa, synthetic construct
  REGION 1..231: note = variant of adenylate kinase from Thermotoga neapolitana
MHHHHHHGGSGMGAYLVFLGPPGAGKGTQGRIISAKTGIPHISTGDILRDIVAKQNDEVASKIKEIMEKGELVPDELGNAVVKHRLSEKDCEKGFILDGFPRTVRQAEYLDSFLESQNRQLTAAVLIKVPEDEVVQRLLSRLICPKCGRIYNMIFLPPKEDELCDDCGVGLVQRLDDKEETVRHRLKVYLEKTQPVIDYYSKKGILKRVDGSQGIDNVVAEVLGILGWSDK

SEQ ID NO: 1425 - DNA, 693 bp, synthetic construct
  misc_feature 1..693: note = variant of adenylate kinase from Thermotoga neapolitana
  source 1..693: mol_type = other DNA
atgcaccatcatcaccatcacgggggctccggcatgggggcatatctggtgttcttaggtccgccgggcgcgggaaaaggtacccaaggccgtattatttcggcaaagactggcatcccgcatattagcacgggcgatatcctgcgtgacatcgtcgctaagcaaaacgatgaagttgcctcgaagattaaagagatcatggagaaaggtgaactcgttccagatgaactgggtaatgcggtagtaacgatgcgcctgtcggagaaagactgcgaaaaaggctttattttggatggtttcccgcgtaccgtgcgccaagcggaatatctggatagttttcttgaaagccagaatcgccagttgacagccgccgtgctgattaaggtccccgaagatgaagttgttcagcgtctgctgtctcgcctgatctgtccgaaatgcgggcgtatctacaacatgatttttctgccaccaaaagaagacgagctgtgtgacgattgcggtgtcggcttagtacagcgtttagatgataaggaagaaacggtccgtcaccgcctgaaagtctaccgtgagaagacccagccggtcattgactattatagtaagaaaggtattctcaaacgcgtagatgggagccaaggaatcgacaacgttgtggcagaagtcctggggattctgggttggagcgataag

SEQ ID NO: 1426 - protein, 231 aa, synthetic construct
  REGION 1..231: note = variant of adenylate kinase from Thermotoga neapolitana
MHHHHHHGGSGMGAYLVFLGPPGAGKGTQGRIISAKTGIPHISTGDILRDIVAKQNDEVASKIKEIMEKGELVPDELGNAVVTMRLSEKDCEKGFILDGFPRTVRQAEYLDSFLESQNRQLTAAVLIKVPEDEVVQRLLSRLICPKCGRIYNMIFLPPKEDELCDDCGVGLVQRLDDKEETVRHRLKVYREKTQPVIDYYSKKGILKRVDGSQGIDNVVAEVLGILGWSDK

SEQ ID NO: 1427 - DNA, 693 bp, synthetic construct
  misc_feature 1..693: note = variant of adenylate kinase from Thermotoga neapolitana
  source 1..693: mol_type = other DNA
atgcaccatcatcaccatcacgggggctccggcatgggggcatatctggtgttcttaggtccgccgggcgcgggaaaaggtacccaaggccgtattatttcggcaaagactggcatcccgcatattagcacgggcgatatcctgcgtgacatcgtcgctaagcaaaacgatgaagttgcctcgaagattaaagagatcatggagaaaggtgaactcgttccagatgaactgggtaatgcggtagtaaaacgccgcctgtcggagaaagactgcgaaaaaggctttattttggatggtttcccgcgtaccgtgcgccaagcggaatatctggatagttttcttgaaagccagaatcgccagttgacagccgccgtgctgattgaggtccccgaagatgaagttgttcagcgtctgctgtctcgcctgatctgtccgaaatgcgggcgtatctacaacatgatttttctgccaccaaaagaagacgagctgtgtgacgattgcggtgtcggcttagtacagcgtttagatgataaggaagaaacggtccgtcaccgcctgaaagtctaccttgagaagacccagccggtcattgactattatagtaagaaaggtattctcaaacgcgtagatgggaaccaaggaatcgacaacgttgtggcagaagtcctggggattctgggttggagcgataag

SEQ ID NO: 1428 - protein, 231 aa, synthetic construct
  REGION 1..231: note = variant of adenylate kinase from Thermotoga neapolitana
MHHHHHHGGSGMGAYLVFLGPPGAGKGTQGRIISAKTGIPHISTGDILRDIVAKQNDEVASKIKEIMEKGELVPDELGNAVVKRRLSEKDCEKGFILDGFPRTVRQAEYLDSFLESQNRQLTAAVLIEVPEDEVVQRLLSRLICPKCGRIYNMIFLPPKEDELCDDCGVGLVQRLDDKEETVRHRLKVYLEKTQPVIDYYSKKGILKRVDGNQGIDNVVAEVLGILGWSDK

SEQ ID NO: 1429 - DNA, 693 bp, synthetic construct
  misc_feature 1..693: note = variant of adenylate kinase from Thermotoga neapolitana
  source 1..693: mol_type = other DNA
atgcaccatcatcaccatcacgggggctccggcatgggggcatatctggtgttcttaggtccgccgggcgcgggaaaaggtacccaaggccgtattatttcggcaaagactggcatcccgcatattagcacgggcgatatcctgcgtgacatcgtcgctacaagcaacgatgaagttgcctcgaaaattaaagagatcatggagaaaggtgaactcgttccagatgaactgggtaatgatgtagtaaaacgccgcctgtcggagaaagactgcgaaaaaggctttattttggatggtttcccgcgtaccgtgcgccaagcggaatatctggatagttttcttgaaagccagaatcgccagttgacagccgccgtgctgattaaagtccccgaagatgaagttgttcagcgtctgctgtctcgcctgatctgtccgaaatgcgggcgtatctacaacatgatttttctgccaccaaaagaagacgagctgtgtgacgattgcggtgtcggcttagtacagcgtttagatgataaggaagaaacggtccgtcaccgcctgaaagtctaccttgagaagacccagccggtcattgactattatagtaagaaaggtattctcaaagaagtagatgggtcgcaaggaatcgacaacgttgtggcagaagtcctggggattctgggttggagcgataag

SEQ ID NO: 1430 - protein, 231 aa, synthetic construct
  REGION 1..231: note = variant of adenylate kinase from Thermotoga neapolitana
MHHHHHHGGSGMGAYLVFLGPPGAGKGTQGRIISAKTGIPHISTGDILRDIVATSNDEVASKIKEIMEKGELVPDELGNDVVKRRLSEKDCEKGFILDGFPRTVRQAEYLDSFLESQNRQLTAAVLIKVPEDEVVQRLLSRLICPKCGRIYNMIFLPPKEDELCDDCGVGLVQRLDDKEETVRHRLKVYLEKTQPVIDYYSKKGILKEVDGSQGIDNVVAEVLGILGWSDK

SEQ ID NO: 1431 - DNA, 693 bp, synthetic construct
  misc_feature 1..693: note = variant of adenylate kinase from Thermotoga neapolitana
  source 1..693: mol_type = other DNA
atgcaccatcatcaccatcacgggggctccggcatgggggcatatctggtgttcttaggtccgccgggcgcgggaaaaggtacccaaggccgtattatttcggcaaagactggcatcccgcatattagcacgggcgatatcctgcgtgacatcgtcgctaagcaaaacgatgaagttgcctcgaagattaaagagatcatggagaaaggtgaactcgttccagatgaactgggtaatgcggtagtaaaacgccgcctgtcggagaaagactgcgaaaaaggctttattttggatggtttcccgcgtaccgtgcgccaagcggaatatctggatagttttcttgaaagccagaatcgccagttgacagccgccgtgctgattaaggtccccgaagatgaagttgttcagcgtctgctgtctcgcctgatctgtccgaaatgcgggcgtatctacaacatgatttttctgccaccaaaagaagacgagctgtgtgacgattgcggtgtcggcttagtacagcgtttagatgataaggaagaaacggtccgtcaccgcctgaaagtctaccatgagaagacccagccggtcattgactattatagtaagaaaggtattctcaaacgcgtagatgggaaccaaggaatcgacaacgttgtggcagaagtcctggggattctgggttggagcgataag

SEQ ID NO: 1432 - protein, 231 aa, synthetic construct
  REGION 1..231: note = variant of adenylate kinase from Thermotoga neapolitana
MHHHHHHGGSGMGAYLVFLGPPGAGKGTQGRIISAKTGIPHISTGDILRDIVAKQNDEVASKIKEIMEKGELVPDELGNAVVKRRLSEKDCEKGFILDGFPRTVRQAEYLDSFLESQNRQLTAAVLIKVPEDEVVQRLLSRLICPKCGRIYNMIFLPPKEDELCDDCGVGLVQRLDDKEETVRHRLKVYHEKTQPVIDYYSKKGILKRVDGNQGIDNVVAEVLGILGWSDK

SEQ ID NO: 1433 - DNA, 693 bp, synthetic construct
  misc_feature 1..693: note = variant of adenylate kinase from Thermotoga neapolitana
  source 1..693: mol_type = other DNA
atgcaccatcatcaccatcacgggggctccggcatgggggcatatctggtgttcttaggtccgccgggcgcgggaaaaggtacccaaggccgtattatttcggcaaagactggcatcccgcatattagcacgggcgatatcctgcgtgacatcgtcgctaaaagcaacgatgaagttgcctcgaaaattaaagagatcatggagaaaggtgaactcgttccagatgaactgggtaatgctgtagtaaaacgccgcctgtcggagaaagactgcgaaaaaggctttattttggatggtttcccgcgtaccgtgcgccaagcggaatatctggatagttttcttgaaagccagaatcgccagttgacagccgccgtgctgattaaagtccccgaagatgaagttgttcagcgtctgctgtctcgcctgatctgtccgaaatgcgggcgtatctacaacatgatttttctgccaccaaaagaagacgagctgtgtgacgattgcggtgtcggcttagtacagcgtttagatgataaggaagaaacggtccgtcaccgcctgaaagtctaccttgagaagacccagccggtcattgactattatagtaagaaaggtattctcaaacgcgtagatgggtcgcaaggaatcgacaacgttgtggcagaagtcctggggattctgggttggagcgataag

SEQ ID NO: 1434 - protein, 231 aa, synthetic construct
  REGION 1..231: note = variant of adenylate kinase from Thermotoga neapolitana
MHHHHHHGGSGMGAYLVFLGPPGAGKGTQGRIISAKTGIPHISTGDILRDIVAKSNDEVASKIKEIMEKGELVPDELGNAVVKRRLSEKDCEKGFILDGFPRTVRQAEYLDSFLESQNRQLTAAVLIKVPEDEVVQRLLSRLICPKCGRIYNMIFLPPKEDELCDDCGVGLVQRLDDKEETVRHRLKVYLEKTQPVIDYYSKKGILKRVDGSQGIDNVVAEVLGILGWSDK

SEQ ID NO: 1435 - DNA, 693 bp, synthetic construct
  misc_feature 1..693: note = variant of adenylate kinase from Thermotoga neapolitana
  source 1..693: mol_type = other DNA
atgcaccatcatcaccatcacgggggctccggcatgggggcatatctggtgttcttaggtccgccgggcgcgggaaaaggtacccaaggccgtattatttcggcaaagactggcatcccgcatattagcacgggcgatatcctgcgtgacatcgtcgctaagcaaaacgatgaagttgcctcgagcattaaagagatcatggagaaaggtgaactcgttccagatgaactgggtaatgcggtagtaaaacgccgcctgtcggagaaagactgcgaaaaaggctttattttggatggtttcccgcgtaccgtgcgccaagcggaatatctggatagttttcttgaaagccagaatcgccagttgacagccgccgtgctgattgaggtccccgaagatgaagttgttcagcgtctgctgtctcgcctgatctgtccgaaatgcgggcgtatctacaacatgatttttctgccaccaaaagaagacgagctgtgtgacgattgcggtgtcggcttagtacagcgtttagatgataaggaagaaacggtccgtcaccgcctgaaagtctaccttgagaagacccagccggtcattgactattatagtaagaaaggtattctcaaacgcgtagatgggtcgcaaggaatcgacaacgttgtggcagaagtcctggggattctgggttggagcgataag

SEQ ID NO: 1436 - protein, 231 aa, synthetic construct
  REGION 1..231: note = variant of adenylate kinase from Thermotoga neapolitana
MHHHHHHGGSGMGAYLVFLGPPGAGKGTQGRIISAKTGIPHISTGDILRDIVAKQNDEVASSIKEIMEKGELVPDELGNAVVKRRLSEKDCEKGFILDGFPRTVRQAEYLDSFLESQNRQLTAAVLIEVPEDEVVQRLLSRLICPKCGRIYNMIFLPPKEDELCDDCGVGLVQRLDDKEETVRHRLKVYLEKTQPVIDYYSKKGILKRVDGSQGIDNVVAEVLGILGWSDK

SEQ ID NO: 1437 - DNA, 693 bp, synthetic construct
  misc_feature 1..693: note = variant of adenylate kinase from Thermotoga neapolitana
  source 1..693: mol_type = other DNA
atgcaccatcatcaccatcacgggggctccggcatgggggcatatctggtgttcttaggtccgccgggcgcgggaaaaggtacccaaggccgtattatttcggcaaagactggcatcccgcatattagcacgggcgatatcctgcgtgacatcgtcgctacacagaacgatgaagttgcctcgaaaattaaagagatcatggagaaaggtgaactcgttccagatgaactgggtaatgatgtagtaaaacgccgcctgtcggagaaagactgcgaaaaaggctttattttggatggtttcccgcgtaccgtgcgccaagcggaatatctggatagttttcttgaaagccagaatcgccagttgacagccgccgtgctgattaaagtccccgaagatgaagttgttcagcgtctgctgtctcgcctgatctgtccgaaatgcgggcgtatctacaacatgatttttctgccaccaaaagaagacgagctgtgtgacgattgcggtgtcggcttagtacagcgtttagatgataaggaagaaacggtccgtcaccgcctgaaagtctaccttgagaagacccagccggtcattgactattatagtaagaaaggtattctcaaagaagtagatgggtcgcaaggaatcgacaacgttgtggcagaagtcctgggggctctgggttggagcgataag

SEQ ID NO: 1438 - protein, 231 aa, synthetic construct
  REGION 1..231: note = variant of adenylate kinase from Thermotoga neapolitana
MHHHHHHGGSGMGAYLVFLGPPGAGKGTQGRIISAKTGIPHISTGDILRDIVATQNDEVASKIKEIMEKGELVPDELGNDVVKRRLSEKDCEKGFILDGFPRTVRQAEYLDSFLESQNRQLTAAVLIKVPEDEVVQRLLSRLICPKCGRIYNMIFLPPKEDELCDDCGVGLVQRLDDKEETVRHRLKVYLEKTQPVIDYYSKKGILKEVDGSQGIDNVVAEVLGALGWSDK

SEQ ID NO: 1439 - DNA, 693 bp, synthetic construct
  misc_feature 1..693: note = variant of adenylate kinase from Thermotoga neapolitana
  source 1..693: mol_type = other DNA
atgcaccatcatcaccatcacgggggctccggcatgggggcatatctggtgttcttaggtccgccgggcgcgggaaaaggtacccaaggccgtattatttcggcaaagactggcatcccgcatattagcacgggcgatatcctgcgtgacatcgtcgctaagcaaaacgatgaagttgcctcgagcattaaagagatcatggagaaaggtgaactcgttccagatgaactgggtaatgcggtagtaacgatgcgcctgtcggagaaagactgcgaaaaaggctttattttggatggtttcccgcgtaccgtgcgccaagcggaatatctggatagttttcttgaaagccagaatcgccagttgacagccgccgtgctgattaaggtccccgaagatgaagttgttcagcgtctgctgtctcgcctgatctgtccgaaatgcgggcgtatctacaacatgatttttctgccaccaaaagaagacgagctgtgtgacgattgcggtgtcggcttagtacagcgtttagatgataaggaagaaacggtccgtcaccgcctgaaagtctaccgtgagaagacccagccggtcattgactattatagtaagaaaggtattctcaaacgcgtagatgggagccaaggaatcgacaacgttgtggcagaagtcctggggattctgggttggagcgataag

SEQ ID NO: 1440 - protein, 231 aa, synthetic construct
  REGION 1..231: note = variant of adenylate kinase from Thermotoga neapolitana
MHHHHHHGGSGMGAYLVFLGPPGAGKGTQGRIISAKTGIPHISTGDILRDIVAKQNDEVASSIKEIMEKGELVPDELGNAVVTMRLSEKDCEKGFILDGFPRTVRQAEYLDSFLESQNRQLTAAVLIKVPEDEVVQRLLSRLICPKCGRIYNMIFLPPKEDELCDDCGVGLVQRLDDKEETVRHRLKVYREKTQPVIDYYSKKGILKRVDGSQGIDNVVAEVLGILGWSDK

SEQ ID NO: 1441 - DNA, 693 bp, synthetic construct
  misc_feature 1..693: note = variant of adenylate kinase from Thermotoga neapolitana
  source 1..693: mol_type = other DNA
atgcaccatcatcaccatcacgggggctccggcatgggggcatatctggtgttcttaggtccgccgggcgcgggaaaaggtacccaaggccgtattatttcggcaaagactggcatcccgcatattagcacgggcgatatcctgcgtgacatcgtcgctaaacagaacgatgaagttgcctcgaaaattaaagagatcatggagaaaggtgaactcgttccagatgaactgggtaatgctgtagtaaaacgccgcctgtcggagaaagactgcgaaaaaggctttattttggatggtttcccgcgtaccgtgcgccaagcggaatatctggatagttttcttgaaagccagaatcgccagttgacagccgccgtgctgattaaagtccccgaagatgaagttgttcagcgtctgctgtctcgcctgatctgtccgaaatgcgggcgtatctacaacatgatttttctgccaccaaaagaagacgagctgtgtgacgattgcggtgtcggcttagtacagcgtttagatgataaggcagaaacggtccgtcaccgcctgaaagtctaccttgagaagacccagccggtcattgactattatagtaagaaaggtattctcaaacgcgtagatgggtcgcaaggaatcgacaacgttgtggcagaagtcctgggggctctgggttggagcgataag

SEQ ID NO: 1442 - protein, 231 aa, synthetic construct
  REGION 1..231: note = variant of adenylate kinase from Thermotoga neapolitana
MHHHHHHGGSGMGAYLVFLGPPGAGKGTQGRIISAKTGIPHISTGDILRDIVAKQNDEVASKIKEIMEKGELVPDELGNAVVKRRLSEKDCEKGFILDGFPRTVRQAEYLDSFLESQNRQLTAAVLIKVPEDEVVQRLLSRLICPKCGRIYNMIFLPPKEDELCDDCGVGLVQRLDDKAETVRHRLKVYLEKTQPVIDYYSKKGILKRVDGSQGIDNVVAEVLGALGWSDK

SEQ ID NO: 1443 - DNA, 693 bp, synthetic construct
  misc_feature 1..693: note = variant of adenylate kinase from Thermotoga neapolitana
  source 1..693: mol_type = other DNA
atgcaccatcatcaccatcacgggggctccggcatgggggcatatctggtgttcttaggtccgccgggcgcgggaaaaggtacccaaggccgtattatttcggcaaagactggcatcccgcatattagcacgggcgatatcctgcgtgacatcgtcgctaagcaaaacgatgaagttgcctcgaagattaaagagatcatggagaaaggtgaactcgttccagatgaactgggtaatgcggtagtaaaacgccgcctgtcggagaaagactgcgaaaaaggctttattttggatggtttcccgcgtaccgtgcgccaagcggaatatctggatagttttcttgaaagccagaatcgccagttgacagccgccgtgctgattaaggtccccgaagatgaagttgttcagcgtctgctgtctcgcctgatctgtccgaaatgcgggcgtatctacaacatgatttttctgccaccaaaagaagacgagctgtgtgacgattgcggtgtcggcttagtacagcgtttagatgataaggaagaaacggtccgtcaccgcctgaaagtctaccgtgagaagacccagccggtcattgactattatagtaagaaaggtattctcaaacgcgtagatgggtcgcaaggaatcgacaacgttgtggcagaagtcctggggattctgggttggagcgataag

SEQ ID NO: 1444 - protein, 231 aa, synthetic construct
  REGION 1..231: note = variant of adenylate kinase from Thermotoga neapolitana
MHHHHHHGGSGMGAYLVFLGPPGAGKGTQGRIISAKTGIPHISTGDILRDIVAKQNDEVASKIKEIMEKGELVPDELGNAVVKRRLSEKDCEKGFILDGFPRTVRQAEYLDSFLESQNRQLTAAVLIKVPEDEVVQRLLSRLICPKCGRIYNMIFLPPKEDELCDDCGVGLVQRLDDKEETVRHRLKVYREKTQPVIDYYSKKGILKRVDGSQGIDNVVAEVLGILGWSDK

SEQ ID NO: 1445 - DNA, 693 bp, synthetic construct
  misc_feature 1..693: note = variant of adenylate kinase from Thermotoga neapolitana
  source 1..693: mol_type = other DNA
atgcaccatcatcaccatcacgggggctccggcatgggggcatatctggtgttcttaggtccgccgggcgcgggaaaaggtacccaaggccgtattatttcggcaaagactggcatcccgcatattagcacgggcgatatcctgcgtgacatcgtcgctaaacagaacgatgaagttgcctcgaaaattaaagagatcatggagaaaggtgaactcgttccagatgaactgggtaatgatgtagtaaaacgccgcctgtcggagaaagactgcgaaaaaggctttattttggatggtttcccgcgtaccgtgcgccaagcggaatatctggatagttttcttgaaagccagaatcgccagttgacagccgccgtgctgattaaagtccccgaagatgaagttgttcagcgtctgctgtctcgcctgatctgtccgaaatgcgggcgtatctacaacatgatttttctgccaccaaaagaagacgagctgtgtgacgattgcggtgacggcttagtacagcgtttagatgataaggaagaaacggtccgtcaccgcctgaaagtctaccttgagaagacccagccggtcattgactattatagtaagaaaggtattctcaaagaagtagatgggtcgcaaggaatcgacaacgttgtggcagaagtcctggggattctgggttggagcgataag

SEQ ID NO: 1446 - protein, 231 aa, synthetic construct
  REGION 1..231: note = variant of adenylate kinase from Thermotoga neapolitana
MHHHHHHGGSGMGAYLVFLGPPGAGKGTQGRIISAKTGIPHISTGDILRDIVAKQNDEVASKIKEIMEKGELVPDELGNDVVKRRLSEKDCEKGFILDGFPRTVRQAEYLDSFLESQNRQLTAAVLIKVPEDEVVQRLLSRLICPKCGRIYNMIFLPPKEDELCDDCGDGLVQRLDDKEETVRHRLKVYLEKTQPVIDYYSKKGILKEVDGSQGIDNVVAEVLGILGWSDK

SEQ ID NO: 1447 - DNA, 693 bp, synthetic construct
  misc_feature 1..693: note = variant of adenylate kinase from Thermotoga neapolitana
  source 1..693: mol_type = other DNA
atgcaccatcatcaccatcacgggggctccggcatgggggcatatctggtgttcttaggtccgccgggcgcgggaaaaggtacccaaggccgtattatttcggcaaagactggcatcccgcatattagcacgggcgatatcctgcgtgacatcgtcgctaagcaaaacgatgaagttgcctcgagcattaaagagatcatggagaaaggtgaactcgttccagatgaactgggtaatgcggtagtaaagcgtcgcctgtcggagaaagactgcgaaaaaggctttattttggatggtttcccgcgtaccgtgcgccaagcggaatatctggatagttttcttgaaagccagaatcgccagttgacagccgccgtgctgattgaggtccccgaagatgaagttgttcagcgtctgctgtctcgcctgatctgtccgaaatgcgggcgtatctacaacatgatttttctgccaccaaaagaagacgagctgtgtgacgattgcggtgtcggcttagtacagcgtttagatgataaggaagaaacggtccgtcaccgcctgaaagtctaccttgagaagacccagccggtcattgactattatagtaagaaaggtattctcaaacgcgtagatgggaaccaaggaatcgacaacgttgtggcagaagtcctggggattctgggttggagcgataag

SEQ ID NO: 1448 - protein, 231 aa, synthetic construct
  REGION 1..231: note = variant of adenylate kinase from Thermotoga neapolitana
MHHHHHHGGSGMGAYLVFLGPPGAGKGTQGRIISAKTGIPHISTGDILRDIVAKQNDEVASSIKEIMEKGELVPDELGNAVVKRRLSEKDCEKGFILDGFPRTVRQAEYLDSFLESQNRQLTAAVLIEVPEDEVVQRLLSRLICPKCGRIYNMIFLPPKEDELCDDCGVGLVQRLDDKEETVRHRLKVYLEKTQPVIDYYSKKGILKRVDGNQGIDNVVAEVLGILGWSDK

SEQ ID NO: 1449 - DNA, 693 bp, synthetic construct
  misc_feature 1..693: note = variant of adenylate kinase from Thermotoga neapolitana
  source 1..693: mol_type = other DNA
atgcaccatcatcaccatcacgggggctccggcatgggggcatatctggtgttcttaggtccgccgggcgcgggaaaaggtacccaaggccgtattatttcggcaaagactggcatcccgcatattagcacgggcgatatcctgcgtgacatcgtcgctaaacagaacgatgaagttgcctcgaaaattaaagagatcatggagaaaggtgaactcgttccagatgaactgggtaatgatgtagtaaaacgccgcctgtcggagaaagactgcgaaaaaggctttattttggatggtttcccgcgtaccgtgcgccaagcggaatatctggatagttttcttgaaagccagaatcgccagttgacagccgccgtgctgattaaagtccccgaagatgaagttgttcagcgtctgctgtctcgcctgatctgtccgaaatgcgggcgtatctacaacatgatttttctgccaccaaaagaagacgagctgtgtgacgattgcggtgtcggcttagtacagcgtttagatgataaggaagaaacggtccgtcaccgcctgaaagtctaccttgagaagacccagccggtcattgactattatagtaagaaaggtattctcaaacgcgtagatgggtcgcaaggaatcgacaacgttgtggcagaagtcctggggattctgggttggagcgataag

SEQ ID NO: 1450 - protein, 231 aa, synthetic construct
  REGION 1..231: note = variant of adenylate kinase from Thermotoga neapolitana
MHHHHHHGGSGMGAYLVFLGPPGAGKGTQGRIISAKTGIPHISTGDILRDIVAKQNDEVASKIKEIMEKGELVPDELGNDVVKRRLSEKDCEKGFILDGFPRTVRQAEYLDSFLESQNRQLTAAVLIKVPEDEVVQRLLSRLICPKCGRIYNMIFLPPKEDELCDDCGVGLVQRLDDKEETVRHRLKVYLEKTQPVIDYYSKKGILKRVDGSQGIDNVVAEVLGILGWSDK

SEQ ID NO: 1451 - DNA, 693 bp, synthetic construct
  misc_feature 1..693: note = variant of adenylate kinase from Thermotoga neapolitana
  source 1..693: mol_type = other DNA
atgcaccatcatcaccatcacgggggctccggcatgggggcatatctggtgttcttaggtccgccgggcgcgggaaaaggtacccaaggccgtattatttcggcaaagactggcatcccgcatattagcacgggcgatatcctgcgtgacatcgtcgctaagcaaaacgatgaagttgcctcgagcattaaagagatcatggagaaaggtgaactcgttccagatgaactgggtaatgcggtagtaaagcgtcgcctgtcggagaaagactgcgaaaaaggctttattttggatggtttcccgcgtaccgtgcgccaagcggaatatctggatagttttcttgaaagccagaatcgccagttgacagccgccgtgctgattaaagtccccgaagatgaagttgttcagcgtctgctgtctcgcctgatctgtccgaaatgcgggcgtatctacaacatgatttttctgccaccaaaagaagacgagctgtgtgacgattgcggtgtcggcttagtacagcgtttagatgataaggaagaaacggtccgtcaccgcctgaaagtctaccttgagaagacccagccggtcattgactattatagtaagaaaggtattctcaaacgcgtagatgggtcgcaaggaatcgacaacgttgtggcagaagtcctggggattctgggttggagcgataag

SEQ ID NO: 1452 - protein, 231 aa, synthetic construct
  REGION 1..231: note = variant of adenylate kinase from Thermotoga neapolitana
MHHHHHHGGSGMGAYLVFLGPPGAGKGTQGRIISAKTGIPHISTGDILRDIVAKQNDEVASSIKEIMEKGELVPDELGNAVVKRRLSEKDCEKGFILDGFPRTVRQAEYLDSFLESQNRQLTAAVLIKVPEDEVVQRLLSRLICPKCGRIYNMIFLPPKEDELCDDCGVGLVQRLDDKEETVRHRLKVYLEKTQPVIDYYSKKGILKRVDGSQGIDNVVAEVLGILGWSDK

SEQ ID NO: 1453 - DNA, 693 bp, synthetic construct
  misc_feature 1..693: note = variant of adenylate kinase from Thermotoga neapolitana
  source 1..693: mol_type = other DNA
atgcaccatcatcaccatcacgggggctccggcatgggggcatatctggtgttcttaggtccgccgggcgcgggaaaaggtacccaaggccgtattatttcggcaaagactggcatcccgcatattagcacgggcgatatcctgcgtgacatcgtcgctacaagcaacgatgaagttgcctcgaaaattaaagagatcatggagaaaggtgaactcgttccagatgaactgggtaatgatgtagtaaaacgccgcctgtcggagaaagactgcgaaaaaggctttattttggatggtttcccgcgtaccgtgcgccaagcggaatatctggatagttttcttgaaagccagaatcgccagttgacagccgccgtgctgattaaagtccccgaagatgaagttgttcagcgtctgctgtctcgcctgatctgtccgaaatgcgggcgtatctacaacatgatttttctgccaccaaaagaagacgagctgtgtgacgattgcggtgtcggcttagtacagcgtttagatgataaggaagaaacggtccgtcaccgcctgaaagtctaccttgagaagacccagccggtcattgactattatagtaagaaaggtattctcaaacgcgtagatgggtcgcaaggaatcgacaacgttgtggcagaagtcctggggctgctgggttggagcgataag

SEQ ID NO: 1454 - protein, 231 aa, synthetic construct
  REGION 1..231: note = variant of adenylate kinase from Thermotoga neapolitana
MHHHHHHGGSGMGAYLVFLGPPGAGKGTQGRIISAKTGIPHISTGDILRDIVATSNDEVASKIKEIMEKGELVPDELGNDVVKRRLSEKDCEKGFILDGFPRTVRQAEYLDSFLESQNRQLTAAVLIKVPEDEVVQRLLSRLICPKCGRIYNMIFLPPKEDELCDDCGVGLVQRLDDKEETVRHRLKVYLEKTQPVIDYYSKKGILKRVDGSQGIDNVVAEVLGLLGWSDK

SEQ ID NO: 1455 - DNA, 693 bp, synthetic construct
  misc_feature 1..693: note = variant of adenylate kinase from Thermotoga neapolitana
  source 1..693: mol_type = other DNA
atgcaccatcatcaccatcacgggggctccggcatgggggcatatctggtgttcttaggtccgccgggcgcgggaaaaggtacccaaggccgtattatttcggcaaagactggcatcccgcatattagcacgggcgatatcctgcgtgacatcgtcgctacacagaacgatgaagttgcctcgaaaattaaagagatcatggagaaaggtgaactcgttccagatgaactgggtaatgatgtagtaaaacgccgcctgtcggagaaagactgcgaaaaaggctttattttggatggtttcccgcgtaccgtgcgccaagcggaatatctggatagttttcttgaaagccagaatcgccagttgacagccgccgtgctgattaaagtccccgaagatgaagttgttcagcgtctgctgtctcgcctgatctgtccgaaatgcgggcgtatctacaacatgatttttctgccaccaaaagaagacgagctgtgtgacgattgcggtgtcggcttagtacagcgtttagatgataaggaacatacggtccgtcaccgcctgaaagtctaccttgagaagacccagccggtcattgactattatagtaagaaaggtattctcaaagaagtagatgggtcgcaaggaatcgacaacgttgtggcagaagtcctggggattctgggttggagcgataag

SEQ ID NO: 1456 - protein, 231 aa, synthetic construct
  REGION 1..231: note = variant of adenylate kinase from Thermotoga neapolitana
MHHHHHHGGSGMGAYLVFLGPPGAGKGTQGRIISAKTGIPHISTGDILRDIVATQNDEVASKIKEIMEKGELVPDELGNDVVKRRLSEKDCEKGFILDGFPRTVRQAEYLDSFLESQNRQLTAAVLIKVPEDEVVQRLLSRLICPKCGRIYNMIFLPPKEDELCDDCGVGLVQRLDDKEHTVRHRLKVYLEKTQPVIDYYSKKGILKEVDGSQGIDNVVAEVLGILGWSDK

SEQ ID NO: 1457 - DNA, 693 bp, synthetic construct
  misc_feature 1..693: note = variant of adenylate kinase from Thermotoga neapolitana
  source 1..693: mol_type = other DNA
atgcaccatcatcaccatcacgggggctccggcatgggggcatatctggtgttcttaggtccgccgggcgcgggaaaaggtacccaaggccgtattatttcggcaaagactggcatcccgcatattagcacgggcgatatcctgcgtgacatcgtcgctaagcaaaacgatgaagttgcctcgaagattaaagagatcatggagaaaggtgaactcgttccagatgaactgggtaatgcggtagtaacgatgcgcctgtcggagaaagactgcgaaaaaggctttattttggatggtttcccgcgtaccgtgcgccaagcggaatatctggatagttttcttgaaagccagaatcgccagttgacagccgccgtgctgattgaggtccccgaagatgaagttgttcagcgtctgctgtctcgcctgatctgtccgaaatgcgggcgtatctacaacatgatttttctgccaccaaaagaagacgagctgtgtgacgattgcggtgtcggcttagtacagcgtttagatgataaggaagaaacggtccgtcaccgcctgaaagtctaccatgagaagacccagccggtcattgactattatagtaagaaaggtattctcaaacgcgtagatgggaaccaaggaatcgacaacgttgtggcagaagtcctggggattctgggttggagcgataag

SEQ ID NO: 1458 - protein, 231 aa, synthetic construct
  REGION 1..231: note = variant of adenylate kinase from Thermotoga neapolitana
MHHHHHHGGSGMGAYLVFLGPPGAGKGTQGRIISAKTGIPHISTGDILRDIVAKQNDEVASKIKEIMEKGELVPDELGNAVVTMRLSEKDCEKGFILDGFPRTVRQAEYLDSFLESQNRQLTAAVLIEVPEDEVVQRLLSRLICPKCGRIYNMIFLPPKEDELCDDCGVGLVQRLDDKEETVRHRLKVYHEKTQPVIDYYSKKGILKRVDGNQGIDNVVAEVLGILGWSDK

SEQ ID NO: 1459 - DNA, 693 bp, synthetic construct
  misc_feature 1..693: note = variant of adenylate kinase from Thermotoga neapolitana
  source 1..693: mol_type = other DNA
atgcaccatcatcaccatcacgggggctccggcatgggggcatatctggtgttcttaggtccgccgggcgcgggaaaaggtacccaaggccgtattatttcggcaaagactggcatcccgcatattagcacgggcgatatcctgcgtgacatcgtcgctaagcaaaacgatgaagttgcctcgagcattaaagagatcatggagaaaggtgaactcgttccagatgaactgggtaatgcggtagtaacgcgtcgcctgtcggagaaagactgcgaaaaaggctttattttggatggtttcccgcgtaccgtgcgccaagcggaatatctggatagttttcttgaaagccagaatcgccagttgacagccgccgtgctgattaaggtccccgaagatgaagttgttcagcgtctgctgtctcgcctgatctgtccgaaatgcgggcgtatctacaacatgatttttctgccaccaaaagaagacgagctgtgtgacgattgcggtgtcggcttagtacagcgtttagatgataaggaagaaacggtccgtcaccgcctgaaagtctaccgtgagaagacccagccggtcattgactattatagtaagaaaggtattctcaaacgcgtagatgggtcgcaaggaatcgacaacgttgtggcagaagtcctggggattctgggttggagcgataag

SEQ ID NO: 1460 - protein, 231 aa, synthetic construct
  REGION 1..231: note = variant of adenylate kinase from Thermotoga neapolitana
MHHHHHHGGSGMGAYLVFLGPPGAGKGTQGRIISAKTGIPHISTGDILRDIVAKQNDEVASSIKEIMEKGELVPDELGNAVVTRRLSEKDCEKGFILDGFPRTVRQAEYLDSFLESQNRQLTAAVLIKVPEDEVVQRLLSRLICPKCGRIYNMIFLPPKEDELCDDCGVGLVQRLDDKEETVRHRLKVYREKTQPVIDYYSKKGILKRVDGSQGIDNVVAEVLGILGWSDK

SEQ ID NO: 1461 - DNA, 693 bp, synthetic construct
  misc_feature 1..693: note = variant of adenylate kinase from Thermotoga neapolitana
  source 1..693: mol_type = other DNA
atgcaccatcatcaccatcacgggggctccggcatgggggcatatctggtgttcttaggtccgccgggcgcgggaaaaggtacccaaggccgtattatttcggcaaagactggcatcccgcatattagcacgggcgatatcctgcgtgacatcgtcgctaaacagaacgatgaagttgcctcgaaaattaaagagatcatggagaaaggtgaactcgttccagatgaactgggtaatgctgtagtaaaacgccgcctgtcggagaaagactgcgaaaaaggctttattttggatggtttcccgcgtaccgtgcgccaagcggaatatctggatagttttcttgaaagccagaatcgccagttgacagccgccgtgctgattaaagtccccgaagatgaagttgttcagcgtctgctgtctcgcctgatctgtccgaaatgcgggcgtatctacaacatgatttttctgccaccaaaagaagacgagctgtgtgacgattgcggtgtcggcttagtacagcgtttagatgataaggtagaaacggtccgtcaccgcctgaaagtctaccttgagaagacccagccggtcattgactattatagtaagaaaggtattctcaaacgcgtagatgggtcgcaaggaatcgacaacgttgtggcagaagtcctgggggctctgggttggagcgataag

SEQ ID NO: 1462 - protein, 231 aa, synthetic construct
  REGION 1..231: note = variant of adenylate kinase from Thermotoga neapolitana
MHHHHHHGGSGMGAYLVFLGPPGAGKGTQGRIISAKTGIPHISTGDILRDIVAKQNDEVASKIKEIMEKGELVPDELGNAVVKRRLSEKDCEKGFILDGFPRTVRQAEYLDSFLESQNRQLTAAVLIKVPEDEVVQRLLSRLICPKCGRIYNMIFLPPKEDELCDDCGVGLVQRLDDKVETVRHRLKVYLEKTQPVIDYYSKKGILKRVDGSQGIDNVVAEVLGALGWSDK

SEQ ID NO: 1463 - DNA, 693 bp, synthetic construct
  misc_feature 1..693: note = variant of adenylate kinase from Thermotoga neapolitana
  source 1..693: mol_type = other DNA
atgcaccatcatcaccatcacgggggctccggcatgggggcatatctggtgttcttaggtccgccgggcgcgggaaaaggtacccaaggccgtattatttcggcaaagactggcatcccgcatattagcacgggcgatatcctgcgtgacatcgtcgctaagcaaaacgatgaagttgcctcgagcattaaagagatcatggagaaaggtgaactcgttccagatgaactgggtaatgcggtagtaaagcgtcgcctgtcggagaaagactgcgaaaaaggctttattttggatggtttcccgcgtaccgtgcgccaagcggaatatctggatagttttcttgaaagccagaatcgccagttgacagccgccgtgctgattaaagtccccgaagatgaagttgttcagcgtctgctgtctcgcctgatctgtccgaaatgcgggcgtatctacaacatgatttttctgccaccaaaagaagacgagctgtgtgacgattgcggtgtcggcttagtacagcgtttagatgataaggaagaaacggtccgtcaccgcctgaaagtctaccgtgagaagacccagccggtcattgactattatagtaagaaaggtattctcaaacgcgtagatgggtcgcaaggaatcgacaacgttgtggcagaagtcctggggattctgggttggagcgataag

SEQ ID NO: 1464 - protein, 231 aa, synthetic construct
  REGION 1..231: note = variant of adenylate kinase from Thermotoga neapolitana
MHHHHHHGGSGMGAYLVFLGPPGAGKGTQGRIISAKTGIPHISTGDILRDIVAKQNDEVASSIKEIMEKGELVPDELGNAVVKRRLSEKDCEKGFILDGFPRTVRQAEYLDSFLESQNRQLTAAVLIKVPEDEVVQRLLSRLICPKCGRIYNMIFLPPKEDELCDDCGVGLVQRLDDKEETVRHRLKVYREKTQPVIDYYSKKGILKRVDGSQGIDNVVAEVLGILGWSDK

SEQ ID NO: 1465 - DNA, 693 bp, synthetic construct
  misc_feature 1..693: note = variant of adenylate kinase from Thermotoga neapolitana
  source 1..693: mol_type = other DNA
atgcaccatcatcaccatcacgggggctccggcatgggggcatatctggtgttcttaggtccgccgggcgcgggaaaaggtacccaaggccgtattatttcggcaaagactggcatcccgcatattagcacgggcgatatcctgcgtgacatcgtcgctaaacagaacgatgaagttgcctcgaaaattaaagagatcatggagaaaggtgaactcgttccagatgaactgggtaatgatgtagtaaaacgccgcctgtcggagaaagactgcgaaaaaggctttattttggatggtttcccgcgtaccgtgcgccaagcggaatatctggatagttttcttgaaagccagaatcgccagttgacagccgccgtgctgattaaagtccccgaagatgaagttgttcagcgtctgctgtctcgcctgatctgtccgaaatgcgggcgtatctacaacatgatttttctgccaccaaaagaagacgagctgtgtgacgattgcggtgtcggcttagtacagcgtttagatgataaggtagaaacggtccgtcaccgcctgaaagtctaccttgagaagacccagccggtcattgactattatagtaagaaaggtattctcaaacgcgtagatgggtcgcaaggaatcgacaacgttgtggcagaagtcctggggattctgggttggagcgataag

SEQ ID NO: 1466 - protein, 231 aa, synthetic construct
  REGION 1..231: note = variant of adenylate kinase from Thermotoga neapolitana
MHHHHHHGGSGMGAYLVFLGPPGAGKGTQGRIISAKTGIPHISTGDILRDIVAKQNDEVASKIKEIMEKGELVPDELGNDVVKRRLSEKDCEKGFILDGFPRTVRQAEYLDSFLESQNRQLTAAVLIKVPEDEVVQRLLSRLICPKCGRIYNMIFLPPKEDELCDDCGVGLVQRLDDKVETVRHRLKVYLEKTQPVIDYYSKKGILKRVDGSQGIDNVVAEVLGILGWSDK

SEQ ID NO: 1467 - DNA, 693 bp, synthetic construct
  misc_feature 1..693: note = variant of adenylate kinase from Thermotoga neapolitana
  source 1..693: mol_type = other DNA
atgcaccatcatcaccatcacgggggctccggcatgggggcatatctggtgttcttaggtccgccgggcgcgggaaaaggtacccaaggccgtattatttcggcaaagactggcatcccgcatattagcacgggcgatatcctgcgtgacatcgtcgctaaacagaacgatgaagttgcctcgaaaattaaagagatcatggagaaaggtgaactcgttccagatgaactgggtaatgatgtagtaaaacgccgcctgtcggagaaagactgcgaaaaaggctttattttggatggtttcccgcgtaccgtgcgccaagcggaatatctggatagttttcttgaaagccagaatcgccagttgacagccgccgtgctgattaaagtccccgaagatgaagttgttcagcgtctgctgtctcgcctgatctgtccgaaatgcgggcgtatctacaacatgatttttctgccaccaaaagaagacgagctgtgtgacgattgcggtgtcggcttagtacagcgtttagatgataaggaacatacggtccgtcaccgcctgaaagtctaccttgagaagacccagccggtcattgactattatagtaagaaaggtattctcaaacgcgtagatgggtcgcaaggaatcgacaacgttgtggcagaagtcctggggattctgggttggagcgataag

SEQ ID NO: 1468 - protein, 231 aa, synthetic construct
  REGION 1..231: note = variant of adenylate kinase from Thermotoga neapolitana
MHHHHHHGGSGMGAYLVFLGPPGAGKGTQGRIISAKTGIPHISTGDILRDIVAKQNDEVASKIKEIMEKGELVPDELGNDVVKRRLSEKDCEKGFILDGFPRTVRQAEYLDSFLESQNRQLTAAVLIKVPEDEVVQRLLSRLICPKCGRIYNMIFLPPKEDELCDDCGVGLVQRLDDKEHTVRHRLKVYLEKTQPVIDYYSKKGILKRVDGSQGIDNVVAEVLGILGWSDK

SEQ ID NO: 1469 - DNA, 693 bp, synthetic construct
  misc_feature 1..693: note = variant of adenylate kinase from Thermotoga neapolitana
  source 1..693: mol_type = other DNA
atgcaccatcatcaccatcacgggggctccggcatgggggcatatctggtgttcttaggtccgccgggcgcgggaaaaggtacccaaggccgtattatttcggcaaagactggcatcccgcatattagcacgggcgatatcctgcgtgacatcgtcgctacacagaacgatgaagttgcctcgaaaattaaagagatcatggagaaaggtgaactcgttccagatgaactgggtaatgatgtagtaaaacgccgcctgtcggagaaagactgcgaaaaaggctttattttggatggtttcccgcgtaccgtgcgccaagcggaatatctggatagttttcttgaaagccagaatcgccagttgacagccgccgtgctgattaaagtccccgaagatgaagttgttcagcgtctgctgtctcgcctgatctgtccgaaatgcgggcgtatctacaacatgatttttctgccaccaaaagaagacgagctgtgtgacgattgcggtgtcggcttagtacagcgtttagatgataaggaagaaacggtccgtcaccgcctgaaagtctaccttgagaagacccagccggtcattgactattatagtaagaaaggtattctcaaacgcgtagatgggtcgcaaggaatcgacaacgttgtggcagaagtcctggggattctgggttggagcgataag

SEQ ID NO: 1470 - protein, 231 aa, synthetic construct
  REGION 1..231: note = variant of adenylate kinase from Thermotoga neapolitana
MHHHHHHGGSGMGAYLVFLGPPGAGKGTQGRIISAKTGIPHISTGDILRDIVATQNDEVASKIKEIMEKGELVPDELGNDVVKRRLSEKDCEKGFILDGFPRTVRQAEYLDSFLESQNRQLTAAVLIKVPEDEVVQRLLSRLICPKCGRIYNMIFLPPKEDELCDDCGVGLVQRLDDKEETVRHRLKVYLEKTQPVIDYYSKKGILKRVDGSQGIDNVVAEVLGILGWSDK

SEQ ID NO: 1471 - DNA, 693 bp, synthetic construct
  misc_feature 1..693: note = variant of adenylate kinase from Thermotoga neapolitana
  source 1..693: mol_type = other DNA
atgcaccatcatcaccatcacgggggctccggcatgggggcatatctggtgttcttaggtccgccgggcgcgggaaaaggtacccaaggccgtattatttcggcaaagactggcatcccgcatattagcacgggcgatatcctgcgtgacatcgtcgctaagcaaaacgatgaagttgcctcgagcattaaagagatcatggagaaaggtgaactcgttccagatgaactgggtaatgcggtagtaacgcatcgcctgtcggagaaagactgcgaaaaaggctttattttggatggtttcccgcgtaccgtgcgccaagcggaatatctggatagttttcttgaaagccagaatcgccagttgacagccgccgtgctgattgaggtccccgaagatgaagttgttcagcgtctgctgtctcgcctgatctgtccgaaatgcgggcgtatctacaacatgatttttctgccaccaaaagaagacgagctgtgtgacgattgcggtgtcggcttagtacagcgtttagatgataaggaagaaacggtccgtcaccgcctgaaagtctaccatgagaagacccagccggtcattgactattatagtaagaaaggtattctcaaacgcgtagatgggaaccaaggaatcgacaacgttgtggcagaagtcctggggattctgggttggagcgataag

SEQ ID NO: 1472 - protein, 231 aa, synthetic construct
  REGION 1..231: note = variant of adenylate kinase from Thermotoga neapolitana
MHHHHHHGGSGMGAYLVFLGPPGAGKGTQGRIISAKTGIPHISTGDILRDIVAKQNDEVASSIKEIMEKGELVPDELGNAVVTHRLSEKDCEKGFILDGFPRTVRQAEYLDSFLESQNRQLTAAVLIEVPEDEVVQRLLSRLICPKCGRIYNMIFLPPKEDELCDDCGVGLVQRLDDKEETVRHRLKVYHEKTQPVIDYYSKKGILKRVDGNQGIDNVVAEVLGILGWSDK

SEQ ID NO: 1473 - DNA, 693 bp, synthetic construct
  misc_feature 1..693: note = variant of adenylate kinase from Thermotoga neapolitana
  source 1..693: mol_type = other DNA
atgcaccatcatcaccatcacgggggctccggcatgggggcatatctggtgttcttaggtccgccgggcgcgggaaaaggtacccaaggccgtattatttcggcaaagactggcatcccgcatattagcacgggcgatatcctgcgtgacatcgtcgctaagcaaaacgatgaagttgcctcgaaaattaaagagatcatggagaaaggtgaactcgttccagatgaactgggtaatgcggtagtaacgatgcgcctgtcggagaaagactgcgaaaaaggctttattttggatggtttcccgcgtaccgtgcgccaagcggaatatctggatagttttcttgaaagccagaatcgccagttgacagccgccgtgctgattaaagtccccgaagatgaagttaaacagcgtctgctgtctcgcctgatctgtccgaaatgcgggcgtatctacaacatgatttttctgccaccaaaagaagacgagctgtgtgacgattgcggtgtcggcttagtacagcgtttagatgataaggaagaaacggtccgtcaccgcctgaaagtctaccttgagaagacccagccggtcattgactattatagtaagaaaggtattctcaaacgcgtagatgggaaccaaggaatcgacaacgttgtggcagaagtcctggggattctgggttggagcgataag

SEQ ID NO: 1474 - protein, 231 aa, synthetic construct
  REGION 1..231: note = variant of adenylate kinase from Thermotoga neapolitana
MHHHHHHGGSGMGAYLVFLGPPGAGKGTQGRIISAKTGIPHISTGDILRDIVAKQNDEVASKIKEIMEKGELVPDELGNAVVTMRLSEKDCEKGFILDGFPRTVRQAEYLDSFLESQNRQLTAAVLIKVPEDEVKQRLLSRLICPKCGRIYNMIFLPPKEDELCDDCGVGLVQRLDDKEETVRHRLKVYLEKTQPVIDYYSKKGILKRVDGNQGIDNVVAEVLGILGWSDK

SEQ ID NO: 1475 - DNA, 693 bp, synthetic construct
  misc_feature 1..693: note = variant of adenylate kinase from Thermotoga neapolitana
  source 1..693: mol_type = other DNA
atgcaccatcatcaccatcacgggggctccggcatgggggcatatctggtgttcttaggtccgccgggcgcgggaaaaggtacccaaggccgtattatttcggcaaagactggcatcccgcatattagcacgggcgatatcctgcgtgacatcgtcgctacacagaacgatgaagttgcctcgaaaattaaagagatcatggagaaaggtgaactcgttccagatgaactgggtaatgatgtagtaaaacgccgcctgtcggagaaagactgcgaaaaaggctttattttggatggtttcccgcgtaccgtgcgccaagcggaatatctggatagttttcttgaaagccagaatcgccagttgacagccgccgtgctgattaaagtccccgaagatgaagttgttcagcgtctgctgtctcgcctgatctgtccgaaatgcgggcgtatctacaacatgatttttctgccaccaaaagaagacgagctgtgtgacgattgcggtgtcggcttagtacagcgtttagatgataaggcagaaacggtccgtcaccgcctgaaagtctaccttgagaagacccagccggtcattgactattatagtaagaaaggtattctcaaagaagtagatgggtcgcaaggaatcgacaacgttgtggcagaagtcctggggattctgggttggagcgataag

SEQ ID NO: 1476 - protein, 231 aa, synthetic construct
  REGION 1..231: note = variant of adenylate kinase from Thermotoga neapolitana
MHHHHHHGGSGMGAYLVFLGPPGAGKGTQGRIISAKTGIPHISTGDILRDIVATQNDEVASKIKEIMEKGELVPDELGNDVVKRRLSEKDCEKGFILDGFPRTVRQAEYLDSFLESQNRQLTAAVLIKVPEDEVVQRLLSRLICPKCGRIYNMIFLPPKEDELCDDCGVGLVQRLDDKAETVRHRLKVYLEKTQPVIDYYSKKGILKEVDGSQGIDNVVAEVLGILGWSDK

SEQ ID NO: 1477 - DNA, 693 bp, synthetic construct
  misc_feature 1..693: note = variant of adenylate kinase from Thermotoga neapolitana
  source 1..693: mol_type = other DNA
atgcaccatcatcaccatcacgggggctccggcatgggggcatatctggtgttcttaggtccgccgggcgcgggaaaaggtacccaaggccgtattatttcggcaaagactggcatcccgcatattagcacgggcgatatcctgcgtgacatcgtcgctaagcaaaacgatgaagttgcctcgagcattaaagagatcatggagaaaggtgaactcgttccagatgaactgggtaatgcggtagtaaagcatcgcctgtcggagaaagactgcgaaaaaggctttattttggatggtttcccgcgtaccgtgcgccaagcggaatatctggatagttttcttgaaagccagaatcgccagttgacagccgccgtgctgattgaggtccccgaagatgaagttgttcagcgtctgctgtctcgcctgatctgtccgaaatgcgggcgtatctacaacatgatttttctgccaccaaaagaagacgagctgtgtgacgattgcggtgtcggcttagtacagcgtttagatgataaggaagaaacggtccgtcaccgcctgaaagtctaccttgagaagacccagccggtcattgactattatagtaagaaaggtattctcaaacgcgtagatgggtcgcaaggaatcgacaacgttgtggcagaagtcctggggattctgggttggagcgataag

SEQ ID NO: 1478 - protein, 231 aa, synthetic construct
  REGION 1..231: note = variant of adenylate kinase from Thermotoga neapolitana
MHHHHHHGGSGMGAYLVFLGPPGAGKGTQGRIISAKTGIPHISTGDILRDIVAKQNDEVASSIKEIMEKGELVPDELGNAVVKHRLSEKDCEKGFILDGFPRTVRQAEYLDSFLESQNRQLTAAVLIEVPEDEVVQRLLSRLICPKCGRIYNMIFLPPKEDELCDDCGVGLVQRLDDKEETVRHRLKVYLEKTQPVIDYYSKKGILKRVDGSQGIDNVVAEVLGILGWSDK

SEQ ID NO: 1479 - DNA, 693 bp, synthetic construct
  misc_feature 1..693: note = variant of adenylate kinase from Thermotoga neapolitana
  source 1..693: mol_type = other DNA
atgcaccatcatcaccatcacgggggctccgacatgggggcatatctggtgttcttaggtccgccgggcgcgggaaaaggtacccaaggccgtattatttcggcaaagactggcatcccgcatattagcacgggcgatatcctgcgtgacatcgtcgctaagcaaaacgatgaagttgcctcgagcattaaagagatcatggagaaaggtgaactcgttccagatgaactgggtaatgcggtagtaaagatgcgcctgtcggagaaagactgcgaaaaaggctttattttggatggtttcccgcgtaccgtgcgccaagcggaatatctggatagttttcttgaaagccagaatcgccagttgacagccgccgtgctgattgaggtccccgaagatgaagttgttcagcgtctgctgtctcgcctgatctgtccgaaatgcgggcgtatctacaacatgatttttctgccaccaaaagaagacgagctgtgtgacgattgcggtgtcggcttagtacagcgtttagatgataaggaagaaacggtccgtcaccgcctgaaagtctaccatgagaagacccagccggtcattgactattatagtaagaaaggtattctcaaacgcgtagatgggaaccaaggaatcgacaacgttgtggcagaagtcctggggattctgggttggagcgataag

SEQ ID NO: 1480 - protein, 231 aa, synthetic construct
  REGION 1..231: note = variant of adenylate kinase from Thermotoga neapolitana
MHHHHHHGGSDMGAYLVFLGPPGAGKGTQGRIISAKTGIPHISTGDILRDIVAKQNDEVASSIKEIMEKGELVPDELGNAVVKMRLSEKDCEKGFILDGFPRTVRQAEYLDSFLESQNRQLTAAVLIEVPEDEVVQRLLSRLICPKCGRIYNMIFLPPKEDELCDDCGVGLVQRLDDKEETVRHRLKVYHEKTQPVIDYYSKKGILKRVDGNQGIDNVVAEVLGILGWSDK

SEQ ID NO: 1481 - DNA, 693 bp, synthetic construct
  misc_feature 1..693: note = variant of adenylate kinase from Thermotoga neapolitana
  source 1..693: mol_type = other DNA
atgcaccatcatcaccatcacgggggctccggcatgggggcatatctggtgttcttaggtccgccgggcgcgggaaaaggtacccaaggccgtattatttcggcaaagactggcatcccgcatattagcacgggcgatatcctgcgtgacatcgtcgctaaacagaacgatgaagttgcctcgaaaattaaagagatcatggagaaaggtgaactcgttccagatgaactgggtaatgatgtagtaaaacgccgcctgtcggagaaagactgcgaaaaaggctttattttggatggtttcccgcgtaccgtgcgccaagcggaatatctggatagttttcttgaaagccagaatcgccagttgacagccgccgtgctgattaaagtccccgaagatgaagttgttcagcgtctgctgtctcgcctgatctgtccgaaatgcgggcgtatctacaacatgatttttctgccaccaaaagaagacgagctgtgtgacgattgcggtgtcggcttagtacagcgtttagatgataaggtagaaacggtccgtcaccgcctgaaagtctaccttgagaagacccagccggtcattgactattatagtaagaaaggtattctcaaagaagtagatgggtcgcaaggaatcgacaacgttgtggcagaagtcctggggattctgggttggagcgataag

SEQ ID NO: 1482 - protein, 231 aa, synthetic construct
  REGION 1..231: note = variant of adenylate kinase from Thermotoga neapolitana
MHHHHHHGGSGMGAYLVFLGPPGAGKGTQGRIISAKTGIPHISTGDILRDIVAKQNDEVASKIKEIMEKGELVPDELGNDVVKRRLSEKDCEKGFILDGFPRTVRQAEYLDSFLESQNRQLTAAVLIKVPEDEVVQRLLSRLICPKCGRIYNMIFLPPKEDELCDDCGVGLVQRLDDKVETVRHRLKVYLEKTQPVIDYYSKKGILKEVDGSQGIDNVVAEVLGILGWSDK

SEQ ID NO: 1483 - DNA, 693 bp, synthetic construct
  misc_feature 1..693: note = variant of adenylate kinase from Thermotoga neapolitana
  source 1..693: mol_type = other DNA
atgcaccatcatcaccatcacgggggctccggcatgggggcatatctggtgttcttaggtccgccgggcgcgggaaaaggtacccaaggccgtattatttcggcaaagactggcatcccgcatattagcacgggcgatatcctgcgtgacatcgtcgctaagcaaaacgatgaagttgcctcgaaaattaaagagatcatggagaaaggtgaactcgttccagatgaactgggtaatgatgtagtaaaacgccgcctgtcggagaaagactgcgaaaaaggctttattttggatggtttcccgcgtaccgtgcgccaagcggaatatctggatagttttcttgaaagccagaatcgccagttgacagccgccgtgctgattaaagtccccgaagatgaagttgttcagcgtctgctgtctcgcctgatctgtccgaaatgcgggcgtatctacaacatgatttttctgccaccaaaagaagacgagctgtgtgacgattgcggtgtcggcttagtacagcgtttagatgataaggaagaaacggtccgtcaccgcctgaaagtctaccttgagaagacccagccggtcattgactattatagtaagaaaggtattctcaaacgcgtagatgggtcgcaaggaatcgacaacgttgtggcagaagtcctgggggctctgggttggagcgataag

SEQ ID NO: 1484 - protein, 231 aa, synthetic construct
  REGION 1..231: note = variant of adenylate kinase from Thermotoga neapolitana
MHHHHHHGGSGMGAYLVFLGPPGAGKGTQGRIISAKTGIPHISTGDILRDIVAKQNDEVASKIKEIMEKGELVPDELGNDVVKRRLSEKDCEKGFILDGFPRTVRQAEYLDSFLESQNRQLTAAVLIKVPEDEVVQRLLSRLICPKCGRIYNMIFLPPKEDELCDDCGVGLVQRLDDKEETVRHRLKVYLEKTQPVIDYYSKKGILKRVDGSQGIDNVVAEVLGALGWSDK

SEQ ID NO: 1485 - DNA, 693 bp, synthetic construct
  misc_feature 1..693: note = variant of adenylate kinase from Thermotoga neapolitana
  source 1..693: mol_type = other DNA
atgcaccatcatcaccatcacgggggctccggcatgggggcatatctggtgttcttaggtccgccgggcgcgggaaaaggtacccaaggccgtattatttcggcaaagactggcatcccgcatattagcacgggcgatatcctgcgtgacatcgtcgctaagcaaaacgatgaagttgcctcgagcattaaagagatcatggagaaaggtgaactcgttccagatgaactgggtaatgcggtagtaaagatgcgcctgtcggagaaagactgcgaaaaaggctttattttggatggtttcccgcgtaccgtgcgccaagcggaatatctggatagttttcttgaaagccagaatcgccagttgacagccgccgtgctgattgaggtccccgaagatgaagttgttcagcgtctgctgtctcgcctgatctgtccgaaatgcgggcgtatctacaacatgatttttctgccaccaaaagaagacgagctgtgtgacgattgcggtgtcggcttagtacagcgtttagatgataaggaagaaacggtccgtcaccgcctgaaagtctaccatgagaagacccagccggtcattgactattatagtaagaaaggtattctcaaacgcgtagatgggaaccaaggaatcgacaacgttgtggcagaagtcctggggattctgggttggagcgataag

SEQ ID NO: 1486 - protein, 231 aa, synthetic construct
  REGION 1..231: note = variant of adenylate kinase from Thermotoga neapolitana
MHHHHHHGGSGMGAYLVFLGPPGAGKGTQGRIISAKTGIPHISTGDILRDIVAKQNDEVASSIKEIMEKGELVPDELGNAVVKMRLSEKDCEKGFILDGFPRTVRQAEYLDSFLESQNRQLTAAVLIEVPEDEVVQRLLSRLICPKCGRIYNMIFLPPKEDELCDDCGVGLVQRLDDKEETVRHRLKVYHEKTQPVIDYYSKKGILKRVDGNQGIDNVVAEVLGILGWSDK

SEQ ID NO: 1487 - DNA, 693 bp, synthetic construct
  misc_feature 1..693: note = variant of adenylate kinase from Thermotoga neapolitana
  source 1..693: mol_type = other DNA
atgcaccatcatcaccatcacgggggctccggcatgggggcatatctggtgttcttaggtccgccgggcgcgggaaaaggtacccaaggccgtattatttcggcaaagactggcatcccgcatattagcacgggcgatatcctgcgtgacatcgtcgctaagcaaaacgatgaagttgcctcgagcattaaagagatcatggagaaaggtgaactcgttccagatgaactgggtaatgcggtagtaaagcatcgcctgtcggagaaagactgcgaaaaaggctttattttggatggtttcccgcgtaccgtgcgccaagcggaatatctggatagttttcttgaaagccagaatcgccagttgacagccgccgtgctgattaaggtccccgaagatgaagttgttcagcgtctgctgtctcgcctgatctgtccgaaatgcgggcgtatctacaacatgatttttctgccaccaaaagaagacgagctgtgtgacgattgcggtgtcggcttagtacagcgtttagatgataaggaagaaacggtccgtcaccgcctgaaagtctaccttgagaagacccagccggtcattgactattatagtaagaaaggtattctcaaacgcgtagatgggaaccaaggaatcgacaacgttgtggcagaagtcctggggattctgggttggagcgataag

SEQ ID NO: 1488 - protein, 231 aa, synthetic construct
  REGION 1..231: note = variant of adenylate kinase from Thermotoga neapolitana
MHHHHHHGGSGMGAYLVFLGPPGAGKGTQGRIISAKTGIPHISTGDILRDIVAKQNDEVASSIKEIMEKGELVPDELGNAVVKHRLSEKDCEKGFILDGFPRTVRQAEYLDSFLESQNRQLTAAVLIKVPEDEVVQRLLSRLICPKCGRIYNMIFLPPKEDELCDDCGVGLVQRLDDKEETVRHRLKVYLEKTQPVIDYYSKKGILKRVDGNQGIDNVVAEVLGILGWSDK

SEQ ID NO: 1489 - DNA, 693 bp, synthetic construct
  misc_feature 1..693: note = variant of adenylate kinase from Thermotoga neapolitana
  source 1..693: mol_type = other DNA
atgcaccatcatcaccatcacgggggctccggcatgggggcatatctggtgttcttaggtccgccgggcgcgggaaaaggtacccaaggccgtattatttcggcaaagactggcatcccgcatattagcacgggcgatatcctgcgtgacatcgtcgctaagcaaaacgatgaagttgcctcgaaaattaaagagatcatggagaaaggtgaactcgttccagatgaactgggtaatgatgtagtaaaacgccgcctgtcggagaaagactgcgaaaaaggctttattttggatggtttcccgcgtaccgtgcgccaagcggaatatctggatagttttcttgaaagccagaatcgccagttgacagccgccgtgctgattaaagtccccgaagatgaagttgttcagcgtctgctgtctcgcctgatctgtccgaaatgcgggcgtatctacaacatgatttttctgccaccaaaagaagacgagctgtgtgacgattgcggtgtcggcttagtacagcgtttagatgataaggtacatacggtccgtcaccgcctgaaagtctaccttgagaagacccagccggtcattgactattatagtaagaaaggtattctcaaagaagtagatgggtcgcaaggaatcgacaacgttgtggcagaagtcctggggctgctgggttggagcgataag

SEQ ID NO: 1490 - protein, 231 aa, synthetic construct
  REGION 1..231: note = variant of adenylate kinase from Thermotoga neapolitana
MHHHHHHGGSGMGAYLVFLGPPGAGKGTQGRIISAKTGIPHISTGDILRDIVAKQNDEVASKIKEIMEKGELVPDELGNDVVKRRLSEKDCEKGFILDGFPRTVRQAEYLDSFLESQNRQLTAAVLIKVPEDEVVQRLLSRLICPKCGRIYNMIFLPPKEDELCDDCGVGLVQRLDDKVHTVRHRLKVYLEKTQPVIDYYSKKGILKEVDGSQGIDNVVAEVLGLLGWSDK

SEQ ID NO: 1491 - DNA, 693 bp, synthetic construct
  misc_feature 1..693: note = variant of adenylate kinase from Thermotoga neapolitana
  source 1..693: mol_type = other DNA
atgcaccatcatcaccatcacgggggctccggcatgggggcatatctggtgttcttaggtccgccgggcgcgggaaaaggtacccaaggccgtattatttcggcaaagactggcatcccgcatattagcacgggcgatatcctgcgtgacatcgtcgctaagcaaaacgatgaagttgcctcgagcattaaagagatcatggagaaaggtgaactcgttccagatgaactgggtaatgcggtagtaaaacgccgcctgtcggagaaagactgcgaaaaaggctttattttggatggtttcccgcgtaccgtgcgccaagcggaatatctggatagttttcttgaaagccagaatcgccagttgacagccgccgtgctgattaaagtccccgaagatgaagttaaacagcgtctgctgtctcgcctgatctgtccgaaatgcgggcgtatctacaacatgatttttctgccaccaaaagaagacgagctgtgtgacgattgcggtgtcggcttagtacagcgtttagatgataaggaagaaacggtccgtcaccgcctgaaagtctaccttgagaagacccagccggtcattgactattatagtaagaaaggtattctcaaacgcgtagatgggtcgcaaggaatcgacaacgttgtggcagaagtcctggggattctgggttggagcgataag

SEQ ID NO: 1492 - protein, 231 aa, synthetic construct
  REGION 1..231: note = variant of adenylate kinase from Thermotoga neapolitana
MHHHHHHGGSGMGAYLVFLGPPGAGKGTQGRIISAKTGIPHISTGDILRDIVAKQNDEVASSIKEIMEKGELVPDELGNAVVKRRLSEKDCEKGFILDGFPRTVRQAEYLDSFLESQNRQLTAAVLIKVPEDEVKQRLLSRLICPKCGRIYNMIFLPPKEDELCDDCGVGLVQRLDDKEETVRHRLKVYLEKTQPVIDYYSKKGILKRVDGSQGIDNVVAEVLGILGWSDK

SEQ ID NO: 1493 - DNA, 693 bp, synthetic construct
  misc_feature 1..693: note = variant of adenylate kinase from Thermotoga neapolitana
  source 1..693: mol_type = other DNA
atgcaccatcatcaccatcacgggggctccggcatgggggcatatctggtgttcttaggtccgccgggcgcgggaaaaggtacccaaggccgtattatttcggcaaagactggcatcccgcatattagcacgggcgatatcctgcgtgacatcgtcgctaaaagcaacgatgaagttgcctcgaaaattaaagagatcatggagaaaggtgaactcgttccagatgaactgggtaatgcggtagtaaaacgccgcctgtcggagaaagactgcgaaaaaggctttattttggatggtttcccgcgtaccgtgcgccaagcggaatatctggatagttttcttgaaagccagaatcgccagttgacagccgccgtgctgattaaagtccccgaagatgaagttgttcagcgtctgctgtctcgcctgatctgtccgaaatgcgggcgtatctacaacatgatttttctgccaccaaaagaagacgagctgtgtgacgattgcggtgtcggcttagtacagcgtttagatgataaggaagaaacggtccgtcaccgcctgaaagtctaccttgagaagacccagccggtcattgactattatagtaagaaaggtattctcaaagaagtagatgggtcgcaaggaatcgacaacgttgtggcagaagtcctggggattctgggttggagcgataag

SEQ ID NO: 1494 - protein, 231 aa, synthetic construct
  REGION 1..231: note = variant of adenylate kinase from Thermotoga neapolitana
MHHHHHHGGSGMGAYLVFLGPPGAGKGTQGRIISAKTGIPHISTGDILRDIVAKSNDEVASKIKEIMEKGELVPDELGNAVVKRRLSEKDCEKGFILDGFPRTVRQAEYLDSFLESQNRQLTAAVLIKVPEDEVVQRLLSRLICPKCGRIYNMIFLPPKEDELCDDCGVGLVQRLDDKEETVRHRLKVYLEKTQPVIDYYSKKGILKEVDGSQGIDNVVAEVLGILGWSDK

SEQ ID NO: 1495 - DNA, 693 bp, synthetic construct
  misc_feature 1..693: note = variant of adenylate kinase from Thermotoga neapolitana
  source 1..693: mol_type = other DNA
atgcaccatcatcaccatcacgggggctccggcatgggggcatatctggtgttcttaggtccgccgggcgcgggaaaaggtacccaaggccgtattatttcggcaaagactggcatcccgcatattagcacgggcgatatcctgcgtgacatcgtcgctaagcaaaacgatgaagttgcctcgagcattaaagagatcatggagaaaggtgaactcgttccagatgaactgggtaatgcggtagtaaagcatcgcctgtcggagaaagactgcgaaaaaggctttattttggatggtttcccgcgtaccgtgcgccaagcggaatatctggatagttttcttgaaagccagaatcgccagttgacagccgccgtgctgattaaagtccccgaagatgaagttgttcagcgtctgctgtctcgcctgatctgtccgaaatgcgggcgtatctacaacatgatttttctgccaccaaaagaagacgagctgtgtgacgattgcggtgtcggcttagtacagcgtttagatgataaggaagaaacggtccgtcaccgcctgaaagtctaccttgagaagacccagccggtcattgactattatagtaagaaaggtattctcaaacgcgtagatgggtcgcaaggaatcgacaacgttgtggcagaagtcctggggattctgggttggagcgataag

SEQ ID NO: 1496 - protein, 231 aa, synthetic construct
  REGION 1..231: note = variant of adenylate kinase from Thermotoga neapolitana
MHHHHHHGGSGMGAYLVFLGPPGAGKGTQGRIISAKTGIPHISTGDILRDIVAKQNDEVASSIKEIMEKGELVPDELGNAVVKHRLSEKDCEKGFILDGFPRTVRQAEYLDSFLESQNRQLTAAVLIKVPEDEVVQRLLSRLICPKCGRIYNMIFLPPKEDELCDDCGVGLVQRLDDKEETVRHRLKVYLEKTQPVIDYYSKKGILKRVDGSQGIDNVVAEVLGILGWSDK

SEQ ID NO: 1497 - DNA, 693 bp, synthetic construct
  misc_feature 1..693: note = variant of adenylate kinase from Thermotoga neapolitana
  source 1..693: mol_type = other DNA
atgcaccatcatcaccatcacgggggctccggcatgggggcatatctggtgttcttaggtccgccgggcgcgggaaaaggtacccaaggccgtattatttcggcaaagactggcatcccgcatattagcacgggcgatatcctgcgtgacatcgtcgctaagcaaaacgatgaagttgcctcgaagattaaagagatcatggagaaaggtgaactcgttccagatgaactgggtaatgcggtagtaaagcgtcgcctgtcggagaaagactgcgaaaaaggctttattttggatggtttcccgcgtaccgtgcgccaagcggaatatctggatagttttcttgaaagccagaatcgccagttgacagccgccgtgctgattgaggtccccgaagatgaagttaaacagcgtctgctgtctcgcctgatctgtccgaaatgcgggcgtatctacaacatgatttttctgccaccaaaagaagacgagctgtgtgacgattgcggtgtcggcttagtacagcgtttagatgataaggaagaaacggtccgtcaccgcctgaaagtctaccatgagaagacccagccggtcattgactattatagtaagaaaggtattctcaaacgcgtagatgggagccaaggaatcgacaacgttgtggcagaagtcctggggattctgggttggagcgataag

SEQ ID NO: 1498 - protein, 231 aa, synthetic construct
  REGION 1..231: note = variant of adenylate kinase from Thermotoga neapolitana
MHHHHHHGGSGMGAYLVFLGPPGAGKGTQGRIISAKTGIPHISTGDILRDIVAKQNDEVASKIKEIMEKGELVPDELGNAVVKRRLSEKDCEKGFILDGFPRTVRQAEYLDSFLESQNRQLTAAVLIEVPEDEVKQRLLSRLICPKCGRIYNMIFLPPKEDELCDDCGVGLVQRLDDKEETVRHRLKVYHEKTQPVIDYYSKKGILKRVDGSQGIDNVVAEVLGILGWSDK

SEQ ID NO: 1499 - DNA, 693 bp, synthetic construct
  misc_feature 1..693: note = variant of adenylate kinase from Thermotoga neapolitana
  source 1..693: mol_type = other DNA
atgcaccatcatcaccatcacgggggctccggcatgggggcatatctggtgttcttaggtccgccgggcgcgggaaaaggtacccaaggccgtattatttcggcaaagactggcatcccgcatattagcacgggcgatatcctgcgtgacatcgtcgctaaaagcaacgatgaagttgcctcgaaaattaaagagatcatggagaaaggtgaactcgttccagatgaactgggtaatgctgtagtaaaacgccgcctgtcggagaaagactgcgaaaaaggctttattttggatggtttcccgcgtaccgtgcgccaagcggaatatctggatagttttcttgaaagccagaatcgccagttgacagccgccgtgctgattaaagtccccgaagatgaagttgttcagcgtctgctgtctcgcctgatctgtccgaaatgcgggcgtatctacaacatgatttttctgccaccaaaagaagacgagctgtgtgacgattgcggtgtcggcttagtacagcgtttagatgataaggaagaaacggtccgtcaccgcctgaaagtctaccttgagaagacccagccggtcattgactattatagtaagaaaggtattctcaaagaagtagatgggtcgcaaggaatcgacaacgttgtggcagaagtcctgggggctctgggttggagcgataag

SEQ ID NO: 1500 - protein, 231 aa, synthetic construct
  REGION 1..231: note = variant of adenylate kinase from Thermotoga neapolitana
MHHHHHHGGSGMGAYLVFLGPPGAGKGTQGRIISAKTGIPHISTGDILRDIVAKSNDEVASKIKEIMEKGELVPDELGNAVVKRRLSEKDCEKGFILDGFPRTVRQAEYLDSFLESQNRQLTAAVLIKVPEDEVVQRLLSRLICPKCGRIYNMIFLPPKEDELCDDCGVGLVQRLDDKEETVRHRLKVYLEKTQPVIDYYSKKGILKEVDGSQGIDNVVAEVLGALGWSDK

SEQ ID NO: 1501 - DNA, 693 bp, synthetic construct
  misc_feature 1..693: note = variant of adenylate kinase from Thermotoga neapolitana
  source 1..693: mol_type = other DNA
atgcaccatcatcaccatcacgggggctccggcatgggggcatatctggtgttcttaggtccgccgggcgcgggaaaaggtacccaaggccgtattatttcggcaaagactggcatcccgcatattagcacgggcgatatcctgcgtgacatcgtcgctaagcaaaacgatgaagttgcctcgaaaattaaagagatcatggagaaaggtgaactcgttccagatgaactgggtaatgcggtagtaaagcgtcgcctgtcggagaaagactgcgaaaaaggctttattttggatggtttcccgcgtaccgtgcgccaagcggaatatctggatagttttcttgaaagccagaatcgccagttgacagccgccgtgctgattaaagtccccgaagatgaagttgttcagcgtctgctgtctcgcctgatctgtccgaaatgcgggcgtatctacaacatgatttttctgccaccaaaagaagacgagctgtgtgacgattgcggtgtcggcttagtacagcgtttagatgataaggaagaaacggtccgtcaccgcctgaaagtctaccatgagaagacccagccggtcattgactattatagtaagaaaggtattctcaaacgcgtagatgggtcgcaaggaatcgacaacgttgtggcagaagtcctggggattctgggttggagcgataag

SEQ ID NO: 1502 - protein, 231 aa, synthetic construct
  REGION 1..231: note = variant of adenylate kinase from Thermotoga neapolitana
MHHHHHHGGSGMGAYLVFLGPPGAGKGTQGRIISAKTGIPHISTGDILRDIVAKQNDEVASKIKEIMEKGELVPDELGNAVVKRRLSEKDCEKGFILDGFPRTVRQAEYLDSFLESQNRQLTAAVLIKVPEDEVVQRLLSRLICPKCGRIYNMIFLPPKEDELCDDCGVGLVQRLDDKEETVRHRLKVYHEKTQPVIDYYSKKGILKRVDGSQGIDNVVAEVLGILGWSDK

SEQ ID NO: 1503 - DNA, 693 bp, synthetic construct
  misc_feature 1..693: note = variant of adenylate kinase from Thermotoga neapolitana
  source 1..693: mol_type = other DNA
atgcaccatcatcaccatcacgggggctccggcatgggggcatatctggtgttcttaggtccgccgggcgcgggaaaaggtacccaaggccgtattatttcggcaaagactggcatcccgcatattagcacgggcgatatcctgcgtgacatcgtcgctaagcaaaacgatgaagttgcctcgaagattaaagagatcatggagaaaggtgaactcgttccagatgaactgggtaatgcggtagtaaagcatcgcctgtcggagaaagactgcgaaaaaggctttattttggatggtttcccgcgtaccgtgcgccaagcggaatatctggatagttttcttgaaagccagaatcgccagttgacagccgccgtgctgattgaggtccccgaagatgaagttgttcagcgtctgctgtctcgcctgatctgtccgaaatgcgggcgtatctacaacatgatttttctgccaccaaaagaagacgagctgtgtgacgattgcggtgtcggcttagtacagcgtttagatgataaggaagaaacggtccgtcaccgcctgaaagtctaccatgagaagacccagccggtcattgactattatagtaagaaaggtattctcaaacgcgtagatgggtcgcaaggaatcgacaacgttgtggcagaagtcctggggattctgggttggagcgataag

SEQ ID NO: 1504 - protein, 231 aa, synthetic construct
  REGION 1..231: note = variant of adenylate kinase from Thermotoga neapolitana
MHHHHHHGGSGMGAYLVFLGPPGAGKGTQGRIISAKTGIPHISTGDILRDIVAKQNDEVASKIKEIMEKGELVPDELGNAVVKHRLSEKDCEKGFILDGFPRTVRQAEYLDSFLESQNRQLTAAVLIEVPEDEVVQRLLSRLICPKCGRIYNMIFLPPKEDELCDDCGVGLVQRLDDKEETVRHRLKVYHEKTQPVIDYYSKKGILKRVDGSQGIDNVVAEVLGILGWSDK

SEQ ID NO: 1505 - DNA, 693 bp, synthetic construct
  misc_feature 1..693: note = variant of adenylate kinase from Thermotoga neapolitana
  source 1..693: mol_type = other DNA
atgcaccatcatcaccatcacgggggctccggcatgggggcatatctggtgttcttaggtccgccgggcgcgggaaaaggtacccaaggccgtattatttcggcaaagactggcatcccgcatattagcacgggcgatatcctgcgtgacatcgtcgctaagcaaaacgatgaagttgcctcgagcattaaagagatcatggagaaaggtgaactcgttccagatgaactgggtaatgcggtagtaaagcatcgcctgtcggagaaagactgcgaaaaaggctttattttggatggtttcccgcgtaccgtgcgccaagcggaatatctggatagttttcttgaaagccagaatcgccagttgacagccgccgtgctgattgaggtccccgaagatgaagttgttcagcgtctgctgtctcgcctgatctgtccgaaatgcgggcgtatctacaacatgatttttctgccaccaaaagaagacgagctgtgtgacgattgcggtgtcggcttagtacagcgtttagatgataaggaagaaacggtccgtcaccgcctgaaagtctaccgtgagaagacccagccggtcattgactattatagtaagaaaggtattctcaaacgcgtagatgggagccaaggaatcgacaacgttgtggcagaagtcctggggattctgggttggagcgataag

SEQ ID NO: 1506 - protein, 231 aa, synthetic construct
  REGION 1..231: note = variant of adenylate kinase from Thermotoga neapolitana
MHHHHHHGGSGMGAYLVFLGPPGAGKGTQGRIISAKTGIPHISTGDILRDIVAKQNDEVASSIKEIMEKGELVPDELGNAVVKHRLSEKDCEKGFILDGFPRTVRQAEYLDSFLESQNRQLTAAVLIEVPEDEVVQRLLSRLICPKCGRIYNMIFLPPKEDELCDDCGVGLVQRLDDKEETVRHRLKVYREKTQPVIDYYSKKGILKRVDGSQGIDNVVAEVLGILGWSDK

SEQ ID NO: 1507 - DNA, 693 bp, synthetic construct
  misc_feature 1..693: note = variant of adenylate kinase from Thermotoga neapolitana
  source 1..693: mol_type = other DNA
atgcaccatcatcaccatcacgggggctccggcatgggggcatatctggtgttcttaggtccgccgggcgcgggaaaaggtacccaaggccgtattatttcggcaaagactggcatcccgcatattagcacgggcgatatcctgcgtgacatcgtcgctaagcaaaacgatgaagttgcctcgagcattaaagagatcatggagaaaggtgaactcgttccagatgaactgggtaatgcggtagtaaaacgccgcctgtcggagaaagactgcgaaaaaggctttattttggatggtttcccgcgtaccgtgcgccaagcggaatatctggatagttttcttgaaagccagaatcgccagttgacagccgccgtgctgattaaagtccccgaagatgaagttaaacagcgtctgctgtctcgcctgatctgtccgaaatgcgggcgtatctacaacatgatttttctgccaccaaaagaagacgagctgtgtgacgattgcggtgtcggcttagtacagcgtttagatgataaggaagaaacggtccgtcaccgcctgaaagtctaccttgagaagacccagccggtcattgactattatagtaagaaaggtattctcaaacgcgtagatgggaaccaaggaatcgacaacgttgtggcagaagtcctggggattctgggttggagcgataag

SEQ ID NO: 1508 - protein, 231 aa, synthetic construct
  REGION 1..231: note = variant of adenylate kinase from Thermotoga neapolitana
MHHHHHHGGSGMGAYLVFLGPPGAGKGTQGRIISAKTGIPHISTGDILRDIVAKQNDEVASSIKEIMEKGELVPDELGNAVVKRRLSEKDCEKGFILDGFPRTVRQAEYLDSFLESQNRQLTAAVLIKVPEDEVKQRLLSRLICPKCGRIYNMIFLPPKEDELCDDCGVGLVQRLDDKEETVRHRLKVYLEKTQPVIDYYSKKGILKRVDGNQGIDNVVAEVLGILGWSDK

SEQ ID NO: 1509 - DNA, 693 bp, synthetic construct
  misc_feature 1..693: note = variant of adenylate kinase from Thermotoga neapolitana
  source 1..693: mol_type = other DNA
atgcaccatcatcaccatcacgggggctccggcatgggggcatatctggtgttcttaggtccgccgggcgcgggaaaaggtacccaaggccgtattatttcggcaaagactggcatcccgcatattagcacgggcgatatcctgcgtgacatcgtcgctacacagaacgatgaagttgcctcgaaaattaaagagatcatggagaaaggtgaactcgttccagatgaactgggtaatgctgtagtaaaacgccgcctgtcggagaaagactgcgaaaaaggctttattttggatggtttcccgcgtaccgtgcgccaagcggaatatctggatagttttcttgaaagccagaatcgccagttgacagccgccgtgctgattaaagtccccgaagatgaagttgttcagcgtctgctgtctcgcctgatctgtccgaaatgcgggcgtatctacaacatgatttttctgccaccaaaagaagacgagctgtgtgacgattgcggtgtcggcttagtacagcgtttagatgataaggtacatacggtccgtcaccgcctgaaagtctaccttgagaagacccagccggtcattgactattatagtaagaaaggtattctcaaacgcgtagatgggtcgcaaggaatcgacaacgttgtggcagaagtcctgggggctctgggttggagcgataag

SEQ ID NO: 1510 - protein, 231 aa, synthetic construct
  REGION 1..231: note = variant of adenylate kinase from Thermotoga neapolitana
MHHHHHHGGSGMGAYLVFLGPPGAGKGTQGRIISAKTGIPHISTGDILRDIVATQNDEVASKIKEIMEKGELVPDELGNAVVKRRLSEKDCEKGFILDGFPRTVRQAEYLDSFLESQNRQLTAAVLIKVPEDEVVQRLLSRLICPKCGRIYNMIFLPPKEDELCDDCGVGLVQRLDDKVHTVRHRLKVYLEKTQPVIDYYSKKGILKRVDGSQGIDNVVAEVLGALGWSDK

SEQ ID NO: 1511 - DNA, 693 bp, synthetic construct
  misc_feature 1..693: note = variant of adenylate kinase from Thermotoga neapolitana
  source 1..693: mol_type = other DNA
atgcaccatcatcaccatcacgggggctccggcatgggggcatatctggtgttcttaggtccgccgggcgcgggaaaaggtacccaaggccgtattatttcggcaaagactggcatcccgcatattagcacgggcgatatcctgcgtgacatcgtcgctaagcaaaacgatgaagttgcctcgaagattaaagagatcatggagaaaggtgaactcgttccagatgaactgggtaatgcggtagtaaaacgccgcctgtcggagaaagactgcgaaaaaggctttattttggatggtttcccgcgtaccgtgcgccaagcggaatatctggatagttttcttgaaagccagaatcgccagttgacagccgccgtgctgattgaggtccccgaagatgaagttgttcagcgtctgctgtctcgcctgatctgtccgaaatgcgggcgtatctacaacatgatttttctgccaccaaaagaagacgagctgtgtgacgattgcggtgtcggcttagtacagcgtttagatgataaggaagaaacggtccgtcaccgcctgaaagtctaccatgagaagacccagccggtcattgactattatagtaagaaaggtattctcaaacgcgtagatgggagccaaggaatcgacaacgttgtggcagaagtcctggggattctgggttggagcgataag

SEQ ID NO: 1512 - protein, 231 aa, synthetic construct
  REGION 1..231: note = variant of adenylate kinase from Thermotoga neapolitana
MHHHHHHGGSGMGAYLVFLGPPGAGKGTQGRIISAKTGIPHISTGDILRDIVAKQNDEVASKIKEIMEKGELVPDELGNAVVKRRLSEKDCEKGFILDGFPRTVRQAEYLDSFLESQNRQLTAAVLIEVPEDEVVQRLLSRLICPKCGRIYNMIFLPPKEDELCDDCGVGLVQRLDDKEETVRHRLKVYHEKTQPVIDYYSKKGILKRVDGSQGIDNVVAEVLGILGWSDK

SEQ ID NO: 1513 - DNA, 693 bp, synthetic construct
  misc_feature 1..693: note = variant of adenylate kinase from Thermotoga neapolitana
  source 1..693: mol_type = other DNA
atgcaccatcatcaccatcacgggggctccggcatgggggcatatctggtgttcttaggtccgccgggcgcgggaaaaggtacccaaggccgtattatttcggcaaagactggcatcccgcatattagcacgggcgatatcctgcgtgacatcgtcgctaagcaaaacgatgaagttgcctcgagcattaaagagatcatggagaaaggtgaactcgttccagatgaactgggtaatgcggtagtaaagatgcgcctgtcggagaaagactgcgaaaaaggctttattttggatggtttcccgcgtaccgtgcgccaagcggaatatctggatagttttcttgaaagccagaatcgccagttgacagccgccgtgctgattaaagtccccgaagatgaagttaaacagcgtctgctgtctcgcctgatctgtccgaaatgcgggcgtatctacaacatgatttttctgccaccaaaagaagacgagctgtgtgacgattgcggtgtcggcttagtacagcgtttagatgataaggaagaaacggtccgtcaccgcctgaaagtctaccttgagaagacccagccggtcattgactattatagtaagaaaggtattctcaaacgcgtagatgggaaccaaggaatcgacaacgttgtggcagaagtcctggggattctgggttggagcgataag

SEQ ID NO: 1514 - protein, 231 aa, synthetic construct
  REGION 1..231: note = variant of adenylate kinase from Thermotoga neapolitana
MHHHHHHGGSGMGAYLVFLGPPGAGKGTQGRIISAKTGIPHISTGDILRDIVAKQNDEVASSIKEIMEKGELVPDELGNAVVKMRLSEKDCEKGFILDGFPRTVRQAEYLDSFLESQNRQLTAAVLIKVPEDEVKQRLLSRLICPKCGRIYNMIFLPPKEDELCDDCGVGLVQRLDDKEETVRHRLKVYLEKTQPVIDYYSKKGILKRVDGNQGIDNVVAEVLGILGWSDK

SEQ ID NO: 1515 - DNA, 693 bp, synthetic construct
  misc_feature 1..693: note = variant of adenylate kinase from Thermotoga neapolitana
  source 1..693: mol_type = other DNA
atgcaccatcatcaccatcacgggggctccggcatgggggcatatctggtgttcttaggtccgccgggcgcgggaaaaggtacccaaggccgtattatttcggcaaagactggcatcccgcatattagcacgggcgatatcctgcgtgacatcgtcgctaagcaaaacgatgaagttgcctcgaagattaaagagatcatggagaaaggtgaactcgttccagatgaactgggtaatgcggtagtaaaacgccgcctgtcggagaaagactgcgaaaaaggctttattttggatggtttcccgcgtaccgtgcgccaagcggaatatctggatagttttcttgaaagccagaatcgccagttgacagccgccgtgctgattaaagtccccgaagatgaagttaaacagcgtctgctgtctcgcctgatctgtccgaaatgcgggcgtatctacaacatgatttttctgccaccaaaagaagacgagctgtgtgacgattgcggtgtcggcttagtacagcgtttagatgataaggaagaaacggtccgtcaccgcctgaaagtctaccttgagaagacccagccggtcattgactattatagtaagaaaggtattctcaaacgcgtagatgggtcgcaaggaatcgacaacgttgtggcagaagtcctggggattctgggttggagcgataag

SEQ ID NO: 1516 - protein, 231 aa, synthetic construct
  REGION 1..231: note = variant of adenylate kinase from Thermotoga neapolitana
MHHHHHHGGSGMGAYLVFLGPPGAGKGTQGRIISAKTGIPHISTGDILRDIVAKQNDEVASKIKEIMEKGELVPDELGNAVVKRRLSEKDCEKGFILDGFPRTVRQAEYLDSFLESQNRQLTAAVLIKVPEDEVKQRLLSRLICPKCGRIYNMIFLPPKEDELCDDCGVGLVQRLDDKEETVRHRLKVYLEKTQPVIDYYSKKGILKRVDGSQGIDNVVAEVLGILGWSDK

SEQ ID NO: 1517 - DNA, 693 bp, synthetic construct
  misc_feature 1..693: note = variant of adenylate kinase from Thermotoga neapolitana
  source 1..693: mol_type = other DNA
atgcaccatcatcaccatcacgggggctccggcatgggggcatatctggtgttcttaggtccgccgggcgcgggaaaaggtacccaaggccgtattatttcggcaaagactggcatcccgcatattagcacgggcgatatcctgcgtgacatcgtcgctacaagcaacgatgaagttgcctcgaaaattaaagagatcatggagaaaggtgaactcgttccagatgaactgggtaatgctgtagtaaaacgccgcctgtcggagaaagactgcgaaaaaggctttattttggatggtttcccgcgtaccgtgcgccaagcggaatatctggatagttttcttgaaagccagaatcgccagttgacagccgccgtgctgattaaagtccccgaagatgaagttgttcagcgtctgctgtctcgcctgatctgtccgaaatgcgggcgtatctacaacatgatttttctgccaccaaaagaagacgagctgtgtgacgattgcggtgtcggcttagtacagcgtttagatgataaggaagaaacggtccgtcaccgcctgaaagtctaccttgagaagacccagccggtcattgactattatagtaagaaaggtattctcaaacgcgtagatgggtcgcaaggaatcgacaacgttgtggcagaagtcctggggctgctgggttggagcgataag

SEQ ID NO: 1518 - protein, 231 aa, synthetic construct
  REGION 1..231: note = variant of adenylate kinase from Thermotoga neapolitana
MHHHHHHGGSGMGAYLVFLGPPGAGKGTQGRIISAKTGIPHISTGDILRDIVATSNDEVASKIKEIMEKGELVPDELGNAVVKRRLSEKDCEKGFILDGFPRTVRQAEYLDSFLESQNRQLTAAVLIKVPEDEVVQRLLSRLICPKCGRIYNMIFLPPKEDELCDDCGVGLVQRLDDKEETVRHRLKVYLEKTQPVIDYYSKKGILKRVDGSQGIDNVVAEVLGLLGWSDK

SEQ ID NO: 1519 - DNA, 693 bp, synthetic construct
  misc_feature 1..693: note = variant of adenylate kinase from Thermotoga neapolitana
  source 1..693: mol_type = other DNA
atgcaccatcatcaccatcacgggggctccggcatgggggcatatctggtgttcttaggtccgccgggcgcgggaaaaggtacccaaggccgtattatttcggcaaagactggcatcccgcatattagcacgggcgatatcctgcgtgacatcgtcgctaaaagcaacgatgaagttgcctcgaaaattaaagagatcatggagaaaggtgaactcgttccagatgaactgggtaatgatgtagtaaaacgccgcctgtcggagaaagactgcgaaaaaggctttattttggatggtttcccgcgtaccgtgcgccaagcggaatatctggatagttttcttgaaagccagaatcgccagttgacagccgccgtgctgattaaagtccccgaagatgaagttgttcagcgtctgctgtctcgcctgatctgtccgaaatgcgggcgtatctacaacatgatttttctgccaccaaaagaagacgagctgtgtgacgattgcggtgtcggcttagtacagcgtttagatgataaggtacatacggtccgtcaccgcctgaaagtctaccttgagaagacccagccggtcattgactattatagtaagaaaggtattctcaaacgcgtagatgggtcgcaaggaatcgacaacgttgtggcagaagtcctggggattctgggttggagcgataag

SEQ ID NO: 1520 - protein, 231 aa, synthetic construct
  REGION 1..231: note = variant of adenylate kinase from Thermotoga neapolitana
MHHHHHHGGSGMGAYLVFLGPPGAGKGTQGRIISAKTGIPHISTGDILRDIVAKSNDEVASKIKEIMEKGELVPDELGNDVVKRRLSEKDCEKGFILDGFPRTVRQAEYLDSFLESQNRQLTAAVLIKVPEDEVVQRLLSRLICPKCGRIYNMIFLPPKEDELCDDCGVGLVQRLDDKVHTVRHRLKVYLEKTQPVIDYYSKKGILKRVDGSQGIDNVVAEVLGILGWSDK

SEQ ID NO: 1521 - DNA, 693 bp, synthetic construct
  misc_feature 1..693: note = variant of adenylate kinase from Thermotoga neapolitana
  source 1..693: mol_type = other DNA
atgcaccatcatcaccatcacgggggctccggcatgggggcatatctggtgttcttaggtccgccgggcgcgggaaaaggtacccaaggccgtattatttcggcaaagactggcatcccgcatattagcacgggcgatatcctgcgtgacatcgtcgctaagcaaaacgatgaagttgcctcgagcattaaagagatcatggagaaaggtgaactcgttccagatgaactgggtaatgcggtagtaaagatgcgcctgtcggagaaagactgcgaaaaaggctttattttggatggtttcccgcgtaccgtgcgccaagcggaatatctggatagttttcttgaaagccagaatcgccagttgacagccgccgtgctgattaaggtccccgaagatgaagttgttcagcgtctgctgtctcgcctgatctgtccgaaatgcgggcgtatctacaacatgatttttctgccaccaaaagaagacgagctgtgtgacgattgcggtgtcggcttagtacagcgtttagatgataaggaagaaacggtccgtcaccgcctgaaagtctaccttgagaagacccagccggtcattgactattatagtaagaaaggtattctcaaacgcgtagatgggaaccaaggaatcgacaacgttgtggcagaagtcctggggattctgggttggagcgataag

SEQ ID NO: 1522 - protein, 231 aa, synthetic construct
  REGION 1..231: note = variant of adenylate kinase from Thermotoga neapolitana
MHHHHHHGGSGMGAYLVFLGPPGAGKGTQGRIISAKTGIPHISTGDILRDIVAKQNDEVASSIKEIMEKGELVPDELGNAVVKMRLSEKDCEKGFILDGFPRTVRQAEYLDSFLESQNRQLTAAVLIKVPEDEVVQRLLSRLICPKCGRIYNMIFLPPKEDELCDDCGVGLVQRLDDKEETVRHRLKVYLEKTQPVIDYYSKKGILKRVDGNQGIDNVVAEVLGILGWSDK

SEQ ID NO: 1523 - DNA, 693 bp, synthetic construct
  misc_feature 1..693: note = variant of adenylate kinase from Thermotoga neapolitana
  source 1..693: mol_type = other DNA
atgcaccatcatcaccatcacgggggctccggcatgggggcatatctggtgttcttaggtccgccgggcgcgggaaaaggtacccaaggccgtattatttcggcaaagactggcatcccgcatattagcacgggcgatatcctgcgtgacatcgtcgctaagcaaaacgatgaagttgcctcgaagattaaagagatcatggagaaaggtgaactcgttccagatgaactgggtaatgcggtagtaaagatgcgcctgtcggagaaagactgcgaaaaaggctttattttggatggtttcccgcgtaccgtgcgccaagcggaatatctggatagttttcttgaaagccagaatcgccagttgacagccgccgtgctgattaaagtccccgaagatgaagttaaacagcgtctgctgtctcgcctgatctgtccgaaatgcgggcgtatctacaacatgatttttctgccaccaaaagaagacgagctgtgtgacgattgcggtgtcggcttagtacagcgtttagatgataaggaagaaacggtccgtcaccgcctgaaagtctaccgtgagaagacccagccggtcattgactattatagtaagaaaggtattctcaaacgcgtagatgggagccaaggaatcgacaacgttgtggcagaagtcctggggattctgggttggagcgataag

SEQ ID NO: 1524 - protein, 231 aa, synthetic construct
  REGION 1..231: note = variant of adenylate kinase from Thermotoga neapolitana
MHHHHHHGGSGMGAYLVFLGPPGAGKGTQGRIISAKTGIPHISTGDILRDIVAKQNDEVASKIKEIMEKGELVPDELGNAVVKMRLSEKDCEKGFILDGFPRTVRQAEYLDSFLESQNRQLTAAVLIKVPEDEVKQRLLSRLICPKCGRIYNMIFLPPKEDELCDDCGVGLVQRLDDKEETVRHRLKVYREKTQPVIDYYSKKGILKRVDGSQGIDNVVAEVLGILGWSDK

SEQ ID NO: 1525 - DNA, 693 bp, synthetic construct
  misc_feature 1..693: note = variant of adenylate kinase from Thermotoga neapolitana
  source 1..693: mol_type = other DNA
atgcaccatcatcaccatcacgggggctccggcatgggggcatatctggtgttcttaggtccgccgggcgcgggaaaaggtacccaaggccgtattatttcggcaaagactggcatcccgcatattagcacgggcgatatcctgcgtgacatcgtcgctaagcaaaacgatgaagttgcctcgaagattaaagagatcatggagaaaggtgaactcgttccagatgaactgggtaatgcggtagtaaagatgcgcctgtcggagaaagactgcgaaaaaggctttattttggatggtttcccgcgtaccgtgcgccaagcggaatatctggatagttttcttgaaagccagaatcgccagttgacagccgccgtgctgattgaggtccccgaagatgaagttgttcagcgtctgctgtctcgcctgatctgtccgaaatgcgggcgtatctacaacatgatttttctgccaccaaaagaagacgagctgtgtgacgattgcggtgtcggcttagtacagcgtttagatgataaggaagaaacggtccgtcaccgcctgaaagtctaccttgagaagacccagccggtcattgactattatagtaagaaaggtattctcaaacgcgtagatgggagccaaggaatcgacaacgttgtggcagaagtcctggggattctgggttggagcgataag

SEQ ID NO: 1526 - protein, 231 aa, synthetic construct
  REGION 1..231: note = variant of adenylate kinase from Thermotoga neapolitana
MHHHHHHGGSGMGAYLVFLGPPGAGKGTQGRIISAKTGIPHISTGDILRDIVAKQNDEVASKIKEIMEKGELVPDELGNAVVKMRLSEKDCEKGFILDGFPRTVRQAEYLDSFLESQNRQLTAAVLIEVPEDEVVQRLLSRLICPKCGRIYNMIFLPPKEDELCDDCGVGLVQRLDDKEETVRHRLKVYLEKTQPVIDYYSKKGILKRVDGSQGIDNVVAEVLGILGWSDK

SEQ ID NO: 1527 - DNA, 693 bp, synthetic construct
  misc_feature 1..693: note = variant of adenylate kinase from Thermotoga neapolitana
  source 1..693: mol_type = other DNA
atgcaccatcatcaccatcacgggggctccggcatgggggcatatctggtgttcttaggtccgccgggcgcgggaaaaggtacccaaggccgtattatttcggcaaagactggcatcccgcatattagcacgggcgatatcctgcgtgacatcgtcgctacacagaacgatgaagttgcctcgaaaattaaagagatcatggagaaaggtgaactcgttccagatgaactgggtaatgctgtagtaaaacgccgcctgtcggagaaagactgcgaaaaaggctttattttggatggtttcccgcgtaccgtgcgccaagcggaatatctggatagttttcttgaaagccagaatcgccagttgacagccgccgtgctgattaaagtccccgaagatgaagttgttcagcgtctgctgtctcgcctgatctgtccgaaatgcgggcgtatctacaacatgatttttctgccaccaaaagaagacgagctgtgtgacgattgcggtgtcggcttagtacagcgtttagatgataaggaagaaacggtccgtcaccgcctgaaagtctaccttgagaagacccagccggtcattgactattatagtaagaaaggtattctcaaacgcgtagatgggtcgcaaggaatcgacaacgttgtggcagaagtcctggggattctgggttggagcgataag

SEQ ID NO: 1528 - protein, 231 aa, synthetic construct
  REGION 1..231: note = variant of adenylate kinase from Thermotoga neapolitana
MHHHHHHGGSGMGAYLVFLGPPGAGKGTQGRIISAKTGIPHISTGDILRDIVATQNDEVASKIKEIMEKGELVPDELGNAVVKRRLSEKDCEKGFILDGFPRTVRQAEYLDSFLESQNRQLTAAVLIKVPEDEVVQRLLSRLICPKCGRIYNMIFLPPKEDELCDDCGVGLVQRLDDKEETVRHRLKVYLEKTQPVIDYYSKKGILKRVDGSQGIDNVVAEVLGILGWSDK

SEQ ID NO: 1529 - DNA, 693 bp, synthetic construct
  misc_feature 1..693: note = variant of adenylate kinase from Thermotoga neapolitana
  source 1..693: mol_type = other DNA
atgcaccatcatcaccatcacgggggctccggcatgggggcatatctggtgttcttaggtccgccgggcgcgggaaaaggtacccaaggccgtattatttcggcaaagactggcatcccgcatattagcacgggcgatatcctgcgtgacatcgtcgctaagcaaaacgatgaagttgcctcgaagattaaagagatcatggagaaaggtgaactcgttccagatgaactgggtaatgcggtagtaaagatgcgcctgtcggagaaagactgcgaaaaaggctttattttggatggtttcccgcgtaccgtgcgccaagcggaatatctggatagttttcttgaaagccagaatcgccagttgacagccgccgtgctgattgaggtccccgaagatgaagttaaacagcgtctgctgtctcgcctgatctgtccgaaatgcgggcgtatctacaacatgatttttctgccaccaaaagaagacgagctgtgtgacgattgcggtgtcggcttagtacagcgtttagatgataaggaagaaacggtccgtcaccgcctgaaagtctaccttgagaagacccagccggtcattgactattatagtaagaaaggtattctcaaacgcgtagatgggagccaaggaatcgacaacgttgtggcagaagtcctggggattctgggttggagcgataag

SEQ ID NO: 1530 - protein, 231 aa, synthetic construct
  REGION 1..231: note = variant of adenylate kinase from Thermotoga neapolitana
MHHHHHHGGSGMGAYLVFLGPPGAGKGTQGRIISAKTGIPHISTGDILRDIVAKQNDEVASKIKEIMEKGELVPDELGNAVVKMRLSEKDCEKGFILDGFPRTVRQAEYLDSFLESQNRQLTAAVLIEVPEDEVKQRLLSRLICPKCGRIYNMIFLPPKEDELCDDCGVGLVQRLDDKEETVRHRLKVYLEKTQPVIDYYSKKGILKRVDGSQGIDNVVAEVLGILGWSDK

SEQ ID NO: 1531 - DNA, 693 bp, synthetic construct
  misc_feature 1..693: note = variant of adenylate kinase from Thermotoga neapolitana
  source 1..693: mol_type = other DNA
atgcaccatcatcaccatcacgggggctccggcatgggggcatatctggtgttcttaggtccgccgggcgcgggaaaaggtacccaaggccgtattatttcggcaaagactggcatcccgcatattagcacgggcgatatcctgcgtgacatcgtcgctacacagaacgatgaagttgcctcgaaaattaaagagatcatggagaaaggtgaactcgttccagatgaactgggtaatgctgtagtaaaacgccgcctgtcggagaaagactgcgaaaaaggctttattttggatggtttcccgcgtaccgtgcgccaagcggaatatctggatagttttcttgaaagccagaatcgccagttgacagccgccgtgctgattaaagtccccgaagatgaagttgttcagcgtctgctgtctcgcctgatctgtccgaaatgcgggcgtatctacaacatgatttttctgccaccaaaagaagacgagctgtgtgacgattgcggtgtcggcttagtacagcgtttagatgataaggcagaaacggtccgtcaccgcctgaaagtctaccttgagaagacccagccggtcattgactattatagtaagaaaggtattctcaaagaagtagatgggtcgcaaggaatcgacaacgttgtggcagaagtcctgggggctctgggttggagcgataag

SEQ ID NO: 1532 - protein, 231 aa, synthetic construct
  REGION 1..231: note = variant of adenylate kinase from Thermotoga neapolitana
MHHHHHHGGSGMGAYLVFLGPPGAGKGTQGRIISAKTGIPHISTGDILRDIVATQNDEVASKIKEIMEKGELVPDELGNAVVKRRLSEKDCEKGFILDGFPRTVRQAEYLDSFLESQNRQLTAAVLIKVPEDEVVQRLLSRLICPKCGRIYNMIFLPPKEDELCDDCGVGLVQRLDDKAETVRHRLKVYLEKTQPVIDYYSKKGILKEVDGSQGIDNVVAEVLGALGWSDK

SEQ ID NO: 1533 - DNA, 693 bp, synthetic construct
  misc_feature 1..693: note = variant of adenylate kinase from Thermotoga neapolitana
  source 1..693: mol_type = other DNA
atgcaccatcatcaccatcacgggggctccggcatgggggcatatctggtgttcttaggtccgccgggcgcgggaaaaggtacccaaggccgtattatttcggcaaagactggcatcccgcatattagcacgggcgatatcctgcgtgacatcgtcgctaaaagcaacgatgaagttgcctcgaaaattaaagagatcatggagaaaggtgaactcgttccagatgaactgggtaatgctgtagtaaaacgccgcctgtcggagaaagactgcgaaaaaggctttattttggatggtttcccgcgtaccgtgcgccaagcggaatatctggatagttttcttgaaagccagaatcgccagttgacagccgccgtgctgattaaagtccccgaagatgaagttgttcagcgtctgctgtctcgcctgatctgtccgaaatgcgggcgtatctacaacatgatttttctgccaccaaaagaagacgagctgtgtgacgattgcggtgtcggcttagtacagcgtttagatgataaggtagaaacggtccgtcaccgcctgaaagtctaccttgagaagacccagccggtcattgactattatagtaagaaaggtattctcaaacgcgtagatgggtcgcaaggaatcgacaacgttgtggcagaagtcctggggctgctgggttggagcgataag

SEQ ID NO: 1534 - protein, 231 aa, synthetic construct
  REGION 1..231: note = variant of adenylate kinase from Thermotoga neapolitana
MHHHHHHGGSGMGAYLVFLGPPGAGKGTQGRIISAKTGIPHISTGDILRDIVAKSNDEVASKIKEIMEKGELVPDELGNAVVKRRLSEKDCEKGFILDGFPRTVRQAEYLDSFLESQNRQLTAAVLIKVPEDEVVQRLLSRLICPKCGRIYNMIFLPPKEDELCDDCGVGLVQRLDDKVETVRHRLKVYLEKTQPVIDYYSKKGILKRVDGSQGIDNVVAEVLGLLGWSDK

SEQ ID NO: 1535 - DNA, 693 bp, synthetic construct
  misc_feature 1..693: note = variant of adenylate kinase from Thermotoga neapolitana
  source 1..693: mol_type = other DNA
atgcaccatcatcaccatcacgggggctccggcatgggggcatatctggtgttcttaggtccgccgggcgcgggaaaaggtacccaaggccgtattatttcggcaaagactggcatcccgcatattagcacgggcgatatcctgcgtgacatcgtcgctaagcaaaacgatgaagttgcctcgaaaattaaagagatcatggagaaaggtgaactcgttccagatgaactgggtaatgcggtagtaaaacgccgcctgtcggagaaagactgcgaaaaaggctttattttggatggtttcccgcgtaccgtgcgccaagcggaatatctggatagttttcttgaaagccagaatcgccagttgacagccgccgtgctgattgaggtccccgaagatgaagttgttcagcgtctgctgtctcgcctgatctgtccgaaatgcgggcgtatctacaacatgatttttctgccaccaaaagaagacgagctgtgtgacgattgcggtgtcggcttagtacagcgtttagatgataaggaagaaacggtccgtcaccgcctgaaagtctaccttgagaagacccagccggtcattgactattatagtaagaaaggtattctcaaacgcgtagatgggagccaaggaatcgacaacgttgtggcagaagtcctggggattctgggttggagcgataag

SEQ ID NO: 1536 - protein, 231 aa, synthetic construct
  REGION 1..231: note = variant of adenylate kinase from Thermotoga neapolitana
MHHHHHHGGSGMGAYLVFLGPPGAGKGTQGRIISAKTGIPHISTGDILRDIVAKQNDEVASKIKEIMEKGELVPDELGNAVVKRRLSEKDCEKGFILDGFPRTVRQAEYLDSFLESQNRQLTAAVLIEVPEDEVVQRLLSRLICPKCGRIYNMIFLPPKEDELCDDCGVGLVQRLDDKEETVRHRLKVYLEKTQPVIDYYSKKGILKRVDGSQGIDNVVAEVLGILGWSDK

SEQ ID NO: 1537 - DNA, 693 bp, synthetic construct
  misc_feature 1..693: note = variant of adenylate kinase from Thermotoga neapolitana
  source 1..693: mol_type = other DNA
atgcaccatcatcaccatcacgggggctccggcatgggggcatatctggtgttcttaggtccgccgggcgcgggaaaaggtacccaaggccgtattatttcggcaaagactggcatcccgcatattagcacgggcgatatcctgcgtgacatcgtcgctaagcaaaacgatgaagttgcctcgagcattaaagagatcatggagaaaggtgaactcgttccagatgaactgggtaatgcggtagtaacgatgcgcctgtcggagaaagactgcgaaaaaggctttattttggatggtttcccgcgtaccgtgcgccaagcggaatatctggatagttttcttgaaagccagaatcgccagttgacagccgccgtgctgattaaagtccccgaagatgaagttgttcagcgtctgctgtctcgcctgatctgtccgaaatgcgggcgtatctacaacatgattacgctgccaccaaaagaagacgagctgtgtgacgattgcggtgtcggcttagtacagcgtttagatgataaggaagaaacggtccgtcaccgcctgaaagtctaccgtgagaagacccagccggtcattgactattatagtaagaaaggtattctcaaacgcgtagatgggtcgcaaggaatcgacaacgttgtggcagaagtcctggggattctgggttggagcgataag

SEQ ID NO: 1538 - protein, 231 aa, synthetic construct
  REGION 1..231: note = variant of adenylate kinase from Thermotoga neapolitana
MHHHHHHGGSGMGAYLVFLGPPGAGKGTQGRIISAKTGIPHISTGDILRDIVAKQNDEVASSIKEIMEKGELVPDELGNAVVTMRLSEKDCEKGFILDGFPRTVRQAEYLDSFLESQNRQLTAAVLIKVPEDEVVQRLLSRLICPKCGRIYNMITLPPKEDELCDDCGVGLVQRLDDKEETVRHRLKVYREKTQPVIDYYSKKGILKRVDGSQGIDNVVAEVLGILGWSDK

SEQ ID NO: 1539 - DNA, 693 bp, synthetic construct
  misc_feature 1..693: note = variant of adenylate kinase from Thermotoga neapolitana
  source 1..693: mol_type = other DNA
atgcaccatcatcaccatcacgggggctccggcatgggggcatatctggtgttcttaggtccgccgggcgcgggaaaaggtacccaaggccgtattatttcggcaaagactggcatcccgcatattagcacgggcgatatcctgcgtgacatcgtcgctaagcaaaacgatgaagttgcctcgaaaattaaagagatcatggagaaaggtgaactcgttccagatgaactgggtaatgcggtagtaaagatgcgcctgtcggagaaagactgcgaaaaaggctttattttggatggtttcccgcgtaccgtgcgccaagcggaatatctggatagttttcttgaaagccagaatcgccagttgacagccgccgtgctgattaaagtccccgaagatgaagttaaacagcgtctgctgtctcgcctgatctgtccgaaatgcgggcgtatctacaacatgatttttctgccaccaaaagaagacgagctgtgtgacgattgcggtgtcggcttagtacagcgtttagatgataaggaagaaacggtccgtcaccgcctgaaagtctaccttgagaagacccagccggtcattgactattatagtaagaaaggtattctcaaacgcgtagatgggagccaaggaatcgacaacgttgtggcagaagtcctggggattctgggttggagcgataag

SEQ ID NO: 1540 - protein, 231 aa, synthetic construct
  REGION 1..231: note = variant of adenylate kinase from Thermotoga neapolitana
MHHHHHHGGSGMGAYLVFLGPPGAGKGTQGRIISAKTGIPHISTGDILRDIVAKQNDEVASKIKEIMEKGELVPDELGNAVVKMRLSEKDCEKGFILDGFPRTVRQAEYLDSFLESQNRQLTAAVLIKVPEDEVKQRLLSRLICPKCGRIYNMIFLPPKEDELCDDCGVGLVQRLDDKEETVRHRLKVYLEKTQPVIDYYSKKGILKRVDGSQGIDNVVAEVLGILGWSDK

SEQ ID NO: 1541 - DNA, 693 bp, synthetic construct
  misc_feature 1..693: note = variant of adenylate kinase from Thermotoga neapolitana
  source 1..693: mol_type = other DNA
atgcaccatcatcaccatcacgggggctccggcatgggggcatatctggtgttcttaggtccgccgggcgcgggaaaaggtacccaaggccgtattatttcggcaaagactggcatcccgcatattagcacgggcgatatcctgcgtgacatcgtcgctaagcaaaacgatgaagttgcctcgaaaattaaagagatcatggagaaaggtgaactcgttccagatgaactgggtaatgcggtagtaaagcatcgcctgtcggagaaagactgcgaaaaaggctttattttggatggtttcccgcgtaccgtgcgccaagcggaatatctggatagttttcttgaaagccagaatcgccagttgacagccgccgtgctgattgaggtccccgaagatgaagttgttcagcgtctgctgtctcgcctgatctgtccgaaatgcgggcgtatctacaacatgattacgctgccaccaaaagaagacgagctgtgtgacgattgcggtgtcggcttagtacagcgtttagatgataaggaagaaacggtccgtcaccgcctgaaagtctaccttgagaagacccagccggtcattgactattatagtaagaaaggtattctcaaacgcgtagatgggtcgcaaggaatcgacaacgttgtggcagaagtcctggggattctgggttggagcgataag

SEQ ID NO: 1542 - protein, 231 aa, synthetic construct
  REGION 1..231: note = variant of adenylate kinase from Thermotoga neapolitana
MHHHHHHGGSGMGAYLVFLGPPGAGKGTQGRIISAKTGIPHISTGDILRDIVAKQNDEVASKIKEIMEKGELVPDELGNAVVKHRLSEKDCEKGFILDGFPRTVRQAEYLDSFLESQNRQLTAAVLIEVPEDEVVQRLLSRLICPKCGRIYNMITLPPKEDELCDDCGVGLVQRLDDKEETVRHRLKVYLEKTQPVIDYYSKKGILKRVDGSQGIDNVVAEVLGILGWSDK

SEQ ID NO: 1543 - DNA, 693 bp, synthetic construct
  misc_feature 1..693: note = variant of adenylate kinase from Thermotoga neapolitana
  source 1..693: mol_type = other DNA
atgcaccatcatcaccatcacgggggctccggcatgggggcatatctggtgttcttaggtccgccgggcgcgggaaaaggtacccaaggccgtattatttcggcaaagactggcatcccgcatattagcacgggcgatatcctgcgtgacatcgtcgctaaaagcaacgatgaagttgcctcgaaaattaaagagatcatggagaaaggtgaactcgttccagatgaactgggtaatgcggtagtaaaacgccgcctgtcggagaaagactgcgaaaaaggctttattttggatggtttcccgcgtaccgtgcgccaagcggaatatctggatagttttcttgaaagccagaatcgccagttgacagccgccgtgctgattaaagtccccgaagatgaagttgttcagcgtctgctgtctcgcctgatctgtccgaaatgcgggcgtatctacaacatgatttttctgccaccaaaagaagacgagctgtgtgacgattgcggtgtcggcttagtacagcgtttagatgataaggtacatacggtccgtcaccgcctgaaagtctaccttgagaagacccagccggtcattgactattatagtaagaaaggtattctcaaacgcgtagatgggtcgcaaggaatcgacaacgttgtggcagaagtcctggggattctgggttggagcgataag

SEQ ID NO: 1544 - protein, 231 aa, synthetic construct
  REGION 1..231: note = variant of adenylate kinase from Thermotoga neapolitana
MHHHHHHGGSGMGAYLVFLGPPGAGKGTQGRIISAKTGIPHISTGDILRDIVAKSNDEVASKIKEIMEKGELVPDELGNAVVKRRLSEKDCEKGFILDGFPRTVRQAEYLDSFLESQNRQLTAAVLIKVPEDEVVQRLLSRLICPKCGRIYNMIFLPPKEDELCDDCGVGLVQRLDDKVHTVRHRLKVYLEKTQPVIDYYSKKGILKRVDGSQGIDNVVAEVLGILGWSDK

SEQ ID NO: 1545 - DNA, 693 bp, synthetic construct
  misc_feature 1..693: note = variant of adenylate kinase from Thermotoga neapolitana
  source 1..693: mol_type = other DNA
atgcaccatcatcaccatcacgggggctccggcatgggggcatatctggtgttcttaggtccgccgggcgcgggaaaaggtacccaaggccgtattatttcggcaaagactggcatcccgcatattagcacgggcgatatcctgcgtgacatcgtcgctaagcaaaacgatgaagttgcctcgaagattaaagagatcatggagaaaggtgaactcgttccagatgaactgggtaatgcggtagtaacgatgcgcctgtcggagaaagactgcgaaaaaggctttattttggatggtttcccgcgtaccgtgcgccaagcggaatatctggatagttttcttgaaagccagaatcgccagttgacagccgccgtgctgattgaggtccccgaagatgaagttgttcagcgtctgctgtctcgcctgatctgtccgaaatgcgggcgtatctacaacatgatttttctgccaccaaaagaagacgagctgtgtgacgattgcggtgtcggcttagtacagcgtttagatgataaggaagaaacggtccgtcaccgcctgaaagtctaccgtgagaagacccagccggtcattgactattatagtaagaaaggtattctcaaacgcgtagatgggtcgcaaggaatcgacaacgttgtggcagaagtcctggggattctgggttggagcgataag

SEQ ID NO: 1546 - protein, 231 aa, synthetic construct
  REGION 1..231: note = variant of adenylate kinase from Thermotoga neapolitana
MHHHHHHGGSGMGAYLVFLGPPGAGKGTQGRIISAKTGIPHISTGDILRDIVAKQNDEVASKIKEIMEKGELVPDELGNAVVTMRLSEKDCEKGFILDGFPRTVRQAEYLDSFLESQNRQLTAAVLIEVPEDEVVQRLLSRLICPKCGRIYNMIFLPPKEDELCDDCGVGLVQRLDDKEETVRHRLKVYREKTQPVIDYYSKKGILKRVDGSQGIDNVVAEVLGILGWSDK

SEQ ID NO: 1547 - DNA, 693 bp, synthetic construct
  misc_feature 1..693: note = variant of adenylate kinase from Thermotoga neapolitana
  source 1..693: mol_type = other DNA
atgcaccatcatcaccatcacgggggctccggcatgggggcatatctggtgttcttaggtccgccgggcgcgggaaaaggtacccaaggccgtattatttcggcaaagactggcatcccgcatattagcacgggcgatatcctgcgtgacatcgtcgctaagcaaaacgatgaagttgcctcgaagattaaagagatcatggagaaaggtgaactcgttccagatgaactgggtaatgcggtagtaacgatgcgcctgtcggagaaagactgcgaaaaaggctttattttggatggtttcccgcgtaccgtgcgccaagcggaatatctggatagttttcttgaaagccagaatcgccagttgacagccgccgtgctgattaaggtccccgaagatgaagttgttcagcgtctgctgtctcgcctgatctgtccgaaatgcgggcgtatctacaacatgatttttctgccaccaaaagaagacgagctgtgtgacgattgcggtgtcggcttagtacagcgtttagatgataaggaagaaacggtccgtcaccgcctgaaagtctaccatgagaagacccagccggtcattgactattatagtaagaaaggtattctcaaacgcgtagatgggagccaaggaatcgacaacgttgtggcagaagtcctggggattctgggttggagcgataag

SEQ ID NO: 1548 - protein, 231 aa, synthetic construct
  REGION 1..231: note = variant of adenylate kinase from Thermotoga neapolitana
MHHHHHHGGSGMGAYLVFLGPPGAGKGTQGRIISAKTGIPHISTGDILRDIVAKQNDEVASKIKEIMEKGELVPDELGNAVVTMRLSEKDCEKGFILDGFPRTVRQAEYLDSFLESQNRQLTAAVLIKVPEDEVVQRLLSRLICPKCGRIYNMIFLPPKEDELCDDCGVGLVQRLDDKEETVRHRLKVYHEKTQPVIDYYSKKGILKRVDGSQGIDNVVAEVLGILGWSDK

SEQ ID NO: 1549 - DNA, 693 bp, synthetic construct
  misc_feature 1..693: note = variant of adenylate kinase from Thermotoga neapolitana
  source 1..693: mol_type = other DNA
atgcaccatcatcaccatcacgggggctccggcatgggggcatatctggtgttcttaggtccgccgggcgcgggaaaaggtacccaaggccgtattatttcggcaaagactggcatcccgcatattagcacgggcgatatcctgcgtgacatcgtcgctaagcaaaacgatgaagttgcctcgaagattaaagagatcatggagaaaggtgaactcgttccagatgaactgggtaatgcggtagtaaagatgcgcctgtcggagaaagactgcgaaaaaggctttattttggatggtttcccgcgtaccgtgcgccaagcggaatatctggatagttttcttgaaagccagaatcgccagttgacagccgccgtgctgattaaggtccccgaagatgaagttgttcagcgtctgctgtctcgcctgatctgtccgaaatgcgggcgtatctacaacatgatttttctgccaccaaaagaagacgagctgtgtgacgattgcggtgtcggcttagtacagcgtttagatgataaggaagaaacggtccgtcaccgcctgaaagtctaccttgagaagacccagccggtcattgactattatagtaagaaaggtattctcaaacgcgtagatgggtcgcaaggaatcgacaacgttgtggcagaagtcctggggattctgggttggagcgataag

SEQ ID NO: 1550 - protein, 231 aa, synthetic construct
  REGION 1..231: note = variant of adenylate kinase from Thermotoga neapolitana
MHHHHHHGGSGMGAYLVFLGPPGAGKGTQGRIISAKTGIPHISTGDILRDIVAKQNDEVASKIKEIMEKGELVPDELGNAVVKMRLSEKDCEKGFILDGFPRTVRQAEYLDSFLESQNRQLTAAVLIKVPEDEVVQRLLSRLICPKCGRIYNMIFLPPKEDELCDDCGVGLVQRLDDKEETVRHRLKVYLEKTQPVIDYYSKKGILKRVDGSQGIDNVVAEVLGILGWSDK

SEQ ID NO: 1551 - DNA, 693 bp, synthetic construct
  misc_feature 1..693: note = variant of adenylate kinase from Thermotoga neapolitana
  source 1..693: mol_type = other DNA
atgcaccatcatcaccatcacgggggctccggcatgggggcatatctggtgttcttaggtccgccgggcgcgggaaaaggtacccaaggccgtattatttcggcaaagactggcatcccgcatattagcacgggcgatatcctgcgtgacatcgtcgctacaagcaacgatgaagttgcctcgaaaattaaagagatcatggagaaaggtgaactcgttccagatgaactgggtaatgctgtagtaaaacgccgcctgtcggagaaagactgcgaaaaaggctttattttggatggtttcccgcgtaccgtgcgccaagcggaatatctggatagttttcttgaaagccagaatcgccagttgacagccgccgtgctgattaaagtccccgaagatgaagttgttcagcgtctgctgtctcgcctgatctgtccgaaatgcgggcgtatctacaacatgatttttctgccaccaaaagaagacgagctgtgtgacgattgcggtgtcggcttagtacagcgtttagatgataaggtagaaacggtccgtcaccgcctgaaagtctaccttgagaagacccagccggtcattgactattatagtaagaaaggtattctcaaacgcgtagatgggtcgcaaggaatcgacaacgttgtggcagaagtcctgggggctctgggttggagcgataag

SEQ ID NO: 1552 - protein, 231 aa, synthetic construct
  REGION 1..231: note = variant of adenylate kinase from Thermotoga neapolitana
MHHHHHHGGSGMGAYLVFLGPPGAGKGTQGRIISAKTGIPHISTGDILRDIVATSNDEVASKIKEIMEKGELVPDELGNAVVKRRLSEKDCEKGFILDGFPRTVRQAEYLDSFLESQNRQLTAAVLIKVPEDEVVQRLLSRLICPKCGRIYNMIFLPPKEDELCDDCGVGLVQRLDDKVETVRHRLKVYLEKTQPVIDYYSKKGILKRVDGSQGIDNVVAEVLGALGWSDK

SEQ ID NO: 1553 - DNA, 693 bp, synthetic construct
  misc_feature 1..693: note = variant of adenylate kinase from Thermotoga neapolitana
  source 1..693: mol_type = other DNA
atgcaccatcatcaccatcacgggggctccggcatgggggcatatctggtgttcttaggtccgccgggcgcgggaaaaggtacccaaggccgtattatttcggcaaagactggcatcccgcatattagcacgggcgatatcctgcgtgacatcgtcgctaagcaaaacgatgaagttgcctcgagcattaaagagatcatggagaaaggtgaactcgttccagatgaactgggtaatgcggtagtaaaacgccgcctgtcggagaaagactgcgaaaaaggctttattttggatggtttcccgcgtaccgtgcgccaagcggaatatctggatagttttcttgaaagccagaatcgccagttgacagccgccgtgctgattgaggtccccgaagatgaagttgttcagcgtctgctgtctcgcctgtcgtgtccgaaatgcgggcgtatctacaacatgatttttctgccaccaaaagaagacgagctgtgtgacgattgcggtgtcggcttagtacagcgtttagatgataaggaagaaacggtccgtcaccgcctgaaagtctaccgtgagaagacccagccggtcattgactattatagtaagaaaggtattctcaaacgcgtagatgggtcgcaaggaatcgacaacgttgtggcagaagtcctggggattctgggttggagcgataag

SEQ ID NO: 1554 - protein, 231 aa, synthetic construct
  REGION 1..231: note = variant of adenylate kinase from Thermotoga neapolitana
MHHHHHHGGSGMGAYLVFLGPPGAGKGTQGRIISAKTGIPHISTGDILRDIVAKQNDEVASSIKEIMEKGELVPDELGNAVVKRRLSEKDCEKGFILDGFPRTVRQAEYLDSFLESQNRQLTAAVLIEVPEDEVVQRLLSRLSCPKCGRIYNMIFLPPKEDELCDDCGVGLVQRLDDKEETVRHRLKVYREKTQPVIDYYSKKGILKRVDGSQGIDNVVAEVLGILGWSDK

SEQ ID NO: 1555 - DNA, 693 bp, synthetic construct
  misc_feature 1..693: note = variant of adenylate kinase from Thermotoga neapolitana
  source 1..693: mol_type = other DNA
atgcaccatcatcaccatcacgggggctccggcatgggggcatatctggtgttcttaggtccgccgggcgcgggaaaaggtacccaaggccgtattatttcggcaaagactggcatcccgcatattagcacgggcgatatcctgcgtgacatcgtcgctaagcaaaacgatgaagttgcctcgagcattaaagagatcatggagaaaggtgaactcgttccagatgaactgggtaatgcggtagtaaaacgccgcctgtcggagaaagactgcgaaaaaggctttattttggatggtttcccgcgtaccgtgcgccaagcggaatatctggatagttttcttgaaagccagaatcgccagttgacagccgccgtgctgattgaggtccccgaagatgaagttgttcagcgtctgctgtctcgcctgatctgtccgaaatgcgggcgtatctacaacatgatttttctgccaccaaaagaagacgagctgtgtgacgattgcggtgtcggcttagtacagcgtttagatgataaggaagaaacggtccgtcaccgcctgaaagtctaccgtgagaagacccagccggtcattgactattatagtaagaaaggtattctcaaacgcgtagatgggtcgcaaggaatcgacaacgttgtggcagaagtcctggggattctgggtggtagcgataag

SEQ ID NO: 1556 - protein, 231 aa, synthetic construct
  REGION 1..231: note = variant of adenylate kinase from Thermotoga neapolitana
MHHHHHHGGSGMGAYLVFLGPPGAGKGTQGRIISAKTGIPHISTGDILRDIVAKQNDEVASSIKEIMEKGELVPDELGNAVVKRRLSEKDCEKGFILDGFPRTVRQAEYLDSFLESQNRQLTAAVLIEVPEDEVVQRLLSRLICPKCGRIYNMIFLPPKEDELCDDCGVGLVQRLDDKEETVRHRLKVYREKTQPVIDYYSKKGILKRVDGSQGIDNVVAEVLGILGGSDK

SEQ ID NO: 1557 - DNA, 693 bp, synthetic construct
  misc_feature 1..693: note = variant of adenylate kinase from Thermotoga neapolitana
  source 1..693: mol_type = other DNA
atgcaccatcatcaccatcacgggggctccggcatgggggcatatctggtgttcttaggtccgccgggcgcgggaaaaggtacccaaggccgtattatttcggcaaagactggcatcccgcatattagcacgggcgatatcctgcgtgacatcgtcgctaagcaaaacgatgaagttgcctcgagcattaaagagatcatggagaaaggtgaactcgttccagatgaactgggtaatgcggtagtaaaacgccgcctgtcggagaaagactgcgaaaaaggctttattttggatggtttcccgcgtaccgtgcgccaagcggaatatctggatagttttcttgaaagccagaatcgccagttgacagccgccgtgctgattgaggtccccgaagatgaagttgttgctcgtctgctgtctcgcctgatctgtccgaaatgcgggcgtatctacaacatgatttttctgccaccaaaagaagacgagctgtgtgacgattgcggtgtcggcttagtacagcgtttagatgataaggaagaaacggtccgtcaccgcctgaaagtctaccgtgagaagacccagccggtcattgactattatagtaagaaaggtattctcaaacgcgtagatgggtcgcaaggaatcgacaacgttgtggcagaagtcctggggattctgggttggagcgataag

SEQ ID NO: 1558 - protein, 231 aa, synthetic construct
  REGION 1..231: note = variant of adenylate kinase from Thermotoga neapolitana
MHHHHHHGGSGMGAYLVFLGPPGAGKGTQGRIISAKTGIPHISTGDILRDIVAKQNDEVASSIKEIMEKGELVPDELGNAVVKRRLSEKDCEKGFILDGFPRTVRQAEYLDSFLESQNRQLTAAVLIEVPEDEVVARLLSRLICPKCGRIYNMIFLPPKEDELCDDCGVGLVQRLDDKEETVRHRLKVYREKTQPVIDYYSKKGILKRVDGSQGIDNVVAEVLGILGWSDK

SEQ ID NO: 1559 - DNA, 693 bp, synthetic construct
  misc_feature 1..693: note = variant of adenylate kinase from Thermotoga neapolitana
  source 1..693: mol_type = other DNA
atgcaccatcatcaccatcacgggggctccggcatgggggcatatctggtgttcttaggtccgccgggcgcgggaaaaggtacccaaggccgtattatttcggcaaagactggcatcccgcatattagcacgggcgatatcctgcgtgacatcgtcgctaagcaaaacgatgaagttgcctcgagcattaaagagatcatggagaaaggtgaactcgttccagatgaactgggtaatgcggtagtaaaacgccgcctgtcggagaaagactgcgaaaaaggctttattttggatggtttcccgcgtaccgtgcgccaagcggaatatctggatagttttcttgaaagccagaatcgccagttgacagccgccgtgctgattgaggtccccgaagatgaagttgttcagcgtctgctgtctcgcctgacgtgtccgaaatgcgggcgtatctacaacatgatttttctgccaccaaaagaagacgagctgtgtgacgattgcggtgtcggcttagtacagcgtttagatgataaggaagaaacggtccgtcaccgcctgaaagtctaccgtgagaagacccagccggtcattgactattatagtaagaaaggtattctcaaacgcgtagatgggtcgcaaggaatcgacaacgttgtggcagaagtcctggggattctgggttggagcgataag

SEQ ID NO: 1560 - protein, 231 aa, synthetic construct
  REGION 1..231: note = variant of adenylate kinase from Thermotoga neapolitana
MHHHHHHGGSGMGAYLVFLGPPGAGKGTQGRIISAKTGIPHISTGDILRDIVAKQNDEVASSIKEIMEKGELVPDELGNAVVKRRLSEKDCEKGFILDGFPRTVRQAEYLDSFLESQNRQLTAAVLIEVPEDEVVQRLLSRLTCPKCGRIYNMIFLPPKEDELCDDCGVGLVQRLDDKEETVRHRLKVYREKTQPVIDYYSKKGILKRVDGSQGIDNVVAEVLGILGWSDK

SEQ ID NO: 1561 - DNA, 693 bp, synthetic construct
  misc_feature 1..693: note = variant of adenylate kinase from Thermotoga neapolitana
  source 1..693: mol_type = other DNA
atgcaccatcatcaccatcacgggggctccggcatgggggcatatctggtgttcttaggtccgccgggcgcgggaaaaggtacccaaggccgtattatttcggcaaagactggcatcccgcatattagcacgggcgatatcctgcgtgacatcgtcgctaagcaaaacgatgaagttgcctcgagcattaaagagatcatggagaaaggtgaactcgttccagatgaactgggtaatgcggtacagaaacgccgcctgtcggagaaagactgcgaaaaaggctttattttggatggtttcccgcgtaccgtgcgccaagcggaatatctggatagttttcttgaaagccagaatcgccagttgacagccgccgtgctgattgaggtccccgaagatgaagttgttcagcgtctgctgtctcgcctgatctgtccgaaatgcgggcgtatctacaacatgatttttctgccaccaaaagaagacgagctgtgtgacgattgcggtgtcggcttagtacagcgtttagatgataaggaagaaacggtccgtcaccgcctgaaagtctaccgtgagaagacccagccggtcattgactattatagtaagaaaggtattctcaaacgcgtagatgggtcgcaaggaatcgacaacgttgtggcagaagtcctggggattctgggttggagcgataag

SEQ ID NO: 1562 - protein, 231 aa, synthetic construct
  REGION 1..231: note = variant of adenylate kinase from Thermotoga neapolitana
MHHHHHHGGSGMGAYLVFLGPPGAGKGTQGRIISAKTGIPHISTGDILRDIVAKQNDEVASSIKEIMEKGELVPDELGNAVQKRRLSEKDCEKGFILDGFPRTVRQAEYLDSFLESQNRQLTAAVLIEVPEDEVVQRLLSRLICPKCGRIYNMIFLPPKEDELCDDCGVGLVQRLDDKEETVRHRLKVYREKTQPVIDYYSKKGILKRVDGSQGIDNVVAEVLGILGWSDK

SEQ ID NO: 1563 - DNA, 693 bp, synthetic construct
  misc_feature 1..693: note = variant of adenylate kinase from Thermotoga neapolitana
  source 1..693: mol_type = other DNA
atgcaccatcatcaccatcacgggggctccggcatgggggcatatctggtgttcttaggtccgccgggcgcgggaaaaggtacccaaggccgtattatttcggcaaagactggcatcccgcatattagcacgggcgatatcctgcgtgacatcgtcgctaagcaaaacgatgaagttgcctcgagcattaaagagatcatggagaaaggtgaactcgttccagatgaactgggtaatgcggtagtaaaacgccgcctgtcggagaaagactgcgaaaaaggctttattttggatggtttcccgcgtaccgtgcgccaagcggaatatctggatagttttcttgaaagccagaatcgccagttgacagccgccgtgctgattgaggtccccgaagatgaagttgttcagcgtctgctgtctcgcctggcgtgtccgaaatgcgggcgtatctacaacatgatttttctgccaccaaaagaagacgagctgtgtgacgattgcggtgtcggcttagtacagcgtttagatgataaggaagaaacggtccgtcaccgcctgaaagtctaccgtgagaagacccagccggtcattgactattatagtaagaaaggtattctcaaacgcgtagatgggtcgcaaggaatcgacaacgttgtggcagaagtcctggggattctgggttggagcgataag

SEQ ID NO: 1564 - protein, 231 aa, synthetic construct
  REGION 1..231: note = variant of adenylate kinase from Thermotoga neapolitana
MHHHHHHGGSGMGAYLVFLGPPGAGKGTQGRIISAKTGIPHISTGDILRDIVAKQNDEVASSIKEIMEKGELVPDELGNAVVKRRLSEKDCEKGFILDGFPRTVRQAEYLDSFLESQNRQLTAAVLIEVPEDEVVQRLLSRLACPKCGRIYNMIFLPPKEDELCDDCGVGLVQRLDDKEETVRHRLKVYREKTQPVIDYYSKKGILKRVDGSQGIDNVVAEVLGILGWSDK

SEQ ID NO: 1565 - DNA, 693 bp, synthetic construct
  misc_feature 1..693: note = variant of adenylate kinase from Thermotoga neapolitana
  source 1..693: mol_type = other DNA
atgcaccatcatcaccatcacgggggctccggcatgggggcatatctggtgttcttaggtccgccgggcgcgggaaaaggtacccaaggccgtattatttcggcaaagactggcatcccgcatattagcacgggcgatatcctgcgtgacatcgtcgctaagcaaaacgatgaagttgcctcgagcattaaagagatcatggagaaaggtgaactcgttccagatgaactgggtaatgcggtagtaaaacgccgcctgtcggagaaagactgcgaaaaaggctttattttggatggtttcccgcgtaccgtgcgccaagcggaatatctggatagttttcttgaaagccagaatcgccagttgacagccgccgtgctgattgaggtccccgaagatgaagttgttcagcgtctgctgtctcgcctgatctgtccgaaatgcgggcgtatctacaacatgattttttgtccaccaaaagaagacgagctgtgtgacgattgcggtgtcggcttagtacagcgtttagatgataaggaagaaacggtccgtcaccgcctgaaagtctaccgtgagaagacccagccggtcattgactattatagtaagaaaggtattctcaaacgcgtagatgggtcgcaaggaatcgacaacgttgtggcagaagtcctggggattctgggttggagcgataag

SEQ ID NO: 1566 - protein, 231 aa, synthetic construct
  REGION 1..231: note = variant of adenylate kinase from Thermotoga neapolitana
MHHHHHHGGSGMGAYLVFLGPPGAGKGTQGRIISAKTGIPHISTGDILRDIVAKQNDEVASSIKEIMEKGELVPDELGNAVVKRRLSEKDCEKGFILDGFPRTVRQAEYLDSFLESQNRQLTAAVLIEVPEDEVVQRLLSRLICPKCGRIYNMIFCPPKEDELCDDCGVGLVQRLDDKEETVRHRLKVYREKTQPVIDYYSKKGILKRVDGSQGIDNVVAEVLGILGWSDK

SEQ ID NO: 1567 - DNA, 693 bp, synthetic construct
  misc_feature 1..693: note = variant of adenylate kinase from Thermotoga neapolitana
  source 1..693: mol_type = other DNA
atgcaccatcatcaccatcacgggggctccggcatgggggcatatctggtgttcttaggtccgccgggcgcgggaaaaggtacccaaggccgtattatttcggcaaagactggcatcccgcatattagcacgggcgatatcctgcgtgacatcgtcgctaagcaaaacgatgaagttgcctcgagcattaaagagatcatggagaaaggtgaactcgttccagatgaactgggtaatgcggtagtaaaacgccgcctgtcggagaaagactgcgaaaaaggctttattttggatggtttcccgcgtaccgtgcgccaagcggaatatctggatagttttcttgaaagccagaatcgccagttgacagccgccgtgctgattgaggtccccgaagatgaagttgttcagcgtctgctgtctcgcctgatctgtccgaaatgcgggcgtatctacaacatgatttttctgccaccaaaagaagacgagctgtgtgacgattgcggtgtcggcttagtacagcgtttagatgataaggaagaaacggtccgtcaccgcctgaaagtctaccgtgagaagacccagccggtcattgactattatagtaagaaaggtcctctcaaacgcgtagatgggtcgcaaggaatcgacaacgttgtggcagaagtcctggggattctgggttggagcgataag

SEQ ID NO: 1568 - protein, 231 aa, synthetic construct
  REGION 1..231: note = variant of adenylate kinase from Thermotoga neapolitana
MHHHHHHGGSGMGAYLVFLGPPGAGKGTQGRIISAKTGIPHISTGDILRDIVAKQNDEVASSIKEIMEKGELVPDELGNAVVKRRLSEKDCEKGFILDGFPRTVRQAEYLDSFLESQNRQLTAAVLIEVPEDEVVQRLLSRLICPKCGRIYNMIFLPPKEDELCDDCGVGLVQRLDDKEETVRHRLKVYREKTQPVIDYYSKKGPLKRVDGSQGIDNVVAEVLGILGWSDK

SEQ ID NO: 1569 - DNA, 693 bp, synthetic construct
  misc_feature 1..693: note = variant of adenylate kinase from Thermotoga neapolitana
  source 1..693: mol_type = other DNA
atgcaccatcatcaccatcacgggggctccggcatgggggcatatctggtgttcttaggtccgccgggcgcgggaaaaggtacccaaggccgtattatttcggcaaagactggcatcccgcatattagcacgggcgatatcctgcgtgacatcgtcgctaagcaaaacgatgaagttgcctcgagcattaaagagatcatggagaaaggtgaactcgttccagatgaactgggtaatgcggtacctaaacgccgcctgtcggagaaagactgcgaaaaaggctttattttggatggtttcccgcgtaccgtgcgccaagcggaatatctggatagttttcttgaaagccagaatcgccagttgacagccgccgtgctgattgaggtccccgaagatgaagttgttcagcgtctgctgtctcgcctgatctgtccgaaatgcgggcgtatctacaacatgatttttctgccaccaaaagaagacgagctgtgtgacgattgcggtgtcggcttagtacagcgtttagatgataaggaagaaacggtccgtcaccgcctgaaagtctaccgtgagaagacccagccggtcattgactattatagtaagaaaggtattctcaaacgcgtagatgggtcgcaaggaatcgacaacgttgtggcagaagtcctggggattctgggttggagcgataag

SEQ ID NO: 1570 - protein, 231 aa, synthetic construct
  REGION 1..231: note = variant of adenylate kinase from Thermotoga neapolitana
MHHHHHHGGSGMGAYLVFLGPPGAGKGTQGRIISAKTGIPHISTGDILRDIVAKQNDEVASSIKEIMEKGELVPDELGNAVPKRRLSEKDCEKGFILDGFPRTVRQAEYLDSFLESQNRQLTAAVLIEVPEDEVVQRLLSRLICPKCGRIYNMIFLPPKEDELCDDCGVGLVQRLDDKEETVRHRLKVYREKTQPVIDYYSKKGILKRVDGSQGIDNVVAEVLGILGWSDK

SEQ ID NO: 1571 - DNA, 693 bp, synthetic construct
  misc_feature 1..693: note = variant of adenylate kinase from Thermotoga neapolitana
  source 1..693: mol_type = other DNA
atgcaccatcatcaccatcacgggggctccggcatgggggcatatctggtgttcttaggtccgccgggcgcgggaaaaggtacccaaggccgtattatttcggcaaagactggcatcccgcatattagcacgggcgatatcctgcgtgacatcgtcgctaagcaaaacgatgaagttgcctcgagcattaaagagatcatggagaaaggtgaactcgttccagatgaactgggtaatgcggtagtaaaacgccgcctgtcggagaaagactgcgaaaaaggctttattttggatggtttcccgcgtaccgtgcgccaagcggaatatctggatagttttcttgaaagccagaatcgccagttgacagccgccgtgctgattgaggtccccgaagatgaagttgttcagcgtctgctgtctcgcctgatctgtccgaaatgcgggcgtatctacaacatgatttttctgccaccaaaagaagacgagctgtgtgacgattgcggtgtcggcttagtacagcgtttagatgataaggaagaaacggtccgtcaccgcctgaaagtctaccgtgagaagacccagccggtcattgactattatagtaagaaaggtattctcaaacgcgtagatgggtcgcaaggaatcgacaacgttgtggcagaagtcctggggattcctggttggagcgataag

SEQ ID NO: 1572 - protein, 231 aa, synthetic construct
  REGION 1..231: note = variant of adenylate kinase from Thermotoga neapolitana
MHHHHHHGGSGMGAYLVFLGPPGAGKGTQGRIISAKTGIPHISTGDILRDIVAKQNDEVASSIKEIMEKGELVPDELGNAVVKRRLSEKDCEKGFILDGFPRTVRQAEYLDSFLESQNRQLTAAVLIEVPEDEVVQRLLSRLICPKCGRIYNMIFLPPKEDELCDDCGVGLVQRLDDKEETVRHRLKVYREKTQPVIDYYSKKGILKRVDGSQGIDNVVAEVLGIPGWSDK

SEQ ID NO: 1573 - DNA, 693 bp, synthetic construct
  misc_feature 1..693: note = variant of adenylate kinase from Thermotoga neapolitana
  source 1..693: mol_type = other DNA
atgcaccatcatcaccatcacgggggctccggcatgggggcatatctggtgttcttaggtccgccgggcgcgggaaaaggtacccaaggccgtattatttcggcaaagactggcatcccgcatattagcacgggcgatatcctgcgtgacatcgtcgctaagcaaaacgatgaagttgcctcgagcattaaagagatcatggagaaaggtgaactcgttccagatgaactgggtaatgcggtagtaaaacgccgcctgtcggagaaagactgcgaaaaaggctttattttggatggtttcccgcgtaccgtgcgccaagcggaatatctggatagttttcttgaaagccagaatcgccagttgacagccgccgtgctgattgaggtccccgaagatgaagttgttcagcgtctgctgtctcgcctgatctgtccgaaatgcgggcgtatctacaacatgatttttctgccaccaaaagaagacgagctgtgtgacgattgcggtgtcggcttagtacagcgtttagatgataaggaagaaacggtccgtcaccgcctgaaagtctaccgtgagaagacccagccggtcattgactattatagtaagaaaggtattctcaaacgcgtagatgggtcgcaaggaatcgacaacgttgtggcagaagtcctggggattctgggtcttagcgataag

SEQ ID NO: 1574 - protein, 231 aa, synthetic construct
  REGION 1..231: note = variant of adenylate kinase from Thermotoga neapolitana
MHHHHHHGGSGMGAYLVFLGPPGAGKGTQGRIISAKTGIPHISTGDILRDIVAKQNDEVASSIKEIMEKGELVPDELGNAVVKRRLSEKDCEKGFILDGFPRTVRQAEYLDSFLESQNRQLTAAVLIEVPEDEVVQRLLSRLICPKCGRIYNMIFLPPKEDELCDDCGVGLVQRLDDKEETVRHRLKVYREKTQPVIDYYSKKGILKRVDGSQGIDNVVAEVLGILGLSDK

SEQ ID NO: 1575 - DNA, 693 bp, synthetic construct
  misc_feature 1..693: note = variant of adenylate kinase from Thermotoga neapolitana
  source 1..693: mol_type = other DNA
atgcaccatcatcaccatcacgggggctccggcatgggggcatatctggtgttcttaggtccgccgggcgcgggaaaaggtacccaaggccgtattatttcggcaaagactggcatcccgcatattagcacgggcgatatcctgcgtgacatcgtcgctaagcaaaacgatgaagttgcctcgagcattaaagagatcatggagaaaggtgaactcgttccagatgaactgggtaatgcggtagtaaaacgccgcctgtcggagaaagactgcgaaaaaggctttattttggatggtttcccgcgtaccgtgcgccaagcggaatatctggatagttttcttgaaagccagaatcgccagttgacagccgccgtgctgattgaggtccccgaagatgaagttgttcagcgtctgctgtctcgcctgtgttgtccgaaatgcgggcgtatctacaacatgatttttctgccaccaaaagaagacgagctgtgtgacgattgcggtgtcggcttagtacagcgtttagatgataaggaagaaacggtccgtcaccgcctgaaagtctaccgtgagaagacccagccggtcattgactattatagtaagaaaggtattctcaaacgcgtagatgggtcgcaaggaatcgacaacgttgtggcagaagtcctggggattctgggttggagcgataag

SEQ ID NO: 1576 - protein, 231 aa, synthetic construct
  REGION 1..231: note = variant of adenylate kinase from Thermotoga neapolitana
MHHHHHHGGSGMGAYLVFLGPPGAGKGTQGRIISAKTGIPHISTGDILRDIVAKQNDEVASSIKEIMEKGELVPDELGNAVVKRRLSEKDCEKGFILDGFPRTVRQAEYLDSFLESQNRQLTAAVLIEVPEDEVVQRLLSRLCCPKCGRIYNMIFLPPKEDELCDDCGVGLVQRLDDKEETVRHRLKVYREKTQPVIDYYSKKGILKRVDGSQGIDNVVAEVLGILGWSDK

SEQ ID NO: 1577 - DNA, 693 bp, synthetic construct
  misc_feature 1..693: note = variant of adenylate kinase from Thermotoga neapolitana
  source 1..693: mol_type = other DNA
atgcaccatcatcaccatcacgggggctccggcatgggggcatatctggtgttcttaggtccgccgggcgcgggaaaaggtacccaaggccgtattatttcggcaaagactggcatcccgcatattagcacgggcgatatcctgcgtgacatcgtcgctaagcaaaacgatgaagttgcctcgagcattaaagagatcatggagaaaggtgaactcgttccagatgaactgggtaatgcggtagtaaaacgccgcctgtcggagaaagactgcgaaaaaggctttattttggatggtttcccgcgtaccgtgcgccaagcggaatatctggatagttttcttgaaagccagaatcgccagttgacagccgccgtgctgattgaggtccccgaagatgaagttgttcagcgtctgctgtctcgcctgatctgtccgaaatgcgggcgtgggtacaacatgatttttctgccaccaaaagaagacgagctgtgtgacgattgcggtgtcggcttagtacagcgtttagatgataaggaagaaacggtccgtcaccgcctgaaagtctaccgtgagaagacccagccggtcattgactattatagtaagaaaggtattctcaaacgcgtagatgggtcgcaaggaatcgacaacgttgtggcagaagtcctggggattctgggttggagcgataag

SEQ ID NO: 1578 - protein, 231 aa, synthetic construct
  REGION 1..231: note = variant of adenylate kinase from Thermotoga neapolitana
MHHHHHHGGSGMGAYLVFLGPPGAGKGTQGRIISAKTGIPHISTGDILRDIVAKQNDEVASSIKEIMEKGELVPDELGNAVVKRRLSEKDCEKGFILDGFPRTVRQAEYLDSFLESQNRQLTAAVLIEVPEDEVVQRLLSRLICPKCGRGYNMIFLPPKEDELCDDCGVGLVQRLDDKEETVRHRLKVYREKTQPVIDYYSKKGILKRVDGSQGIDNVVAEVLGILGWSDK

SEQ ID NO: 1579 - DNA, 693 bp, synthetic construct
  misc_feature 1..693: note = variant of adenylate kinase from Thermotoga neapolitana
  source 1..693: mol_type = other DNA
atgcaccatcatcaccatcacgggggctccggcatgggggcatatctggtgttcttaggtccgccgggcgcgggaaaaggtacccaaggccgtattatttcggcaaagactggcatcccgcatattagcacgggcgatatcctgcgtgacatcgtcgctaagcaaaacgatgaagttgcctcgagcattaaagagatcatggagaaaggtgaactcgttccagatgaactgggtaatgcggtagtaaaacgccgcctgtcggagaaagactgcgaaaaaggctttattttggatggtttcccgcgtaccgtgcgccaagcggaatatctggatagttttcttgaaagccagaatcgccagttgacagccgccgtgctgattgaggtccccgaagatgaagttgttcagcgtctgctgtctcgcctgatctgtccgaaatgcgggcgttcgtacaacatgatttttctgccaccaaaagaagacgagctgtgtgacgattgcggtgtcggcttagtacagcgtttagatgataaggaagaaacggtccgtcaccgcctgaaagtctaccgtgagaagacccagccggtcattgactattatagtaagaaaggtattctcaaacgcgtagatgggtcgcaaggaatcgacaacgttgtggcagaagtcctggggattctgggttggagcgataag

SEQ ID NO: 1580 - protein, 231 aa, synthetic construct
  REGION 1..231: note = variant of adenylate kinase from Thermotoga neapolitana
MHHHHHHGGSGMGAYLVFLGPPGAGKGTQGRIISAKTGIPHISTGDILRDIVAKQNDEVASSIKEIMEKGELVPDELGNAVVKRRLSEKDCEKGFILDGFPRTVRQAEYLDSFLESQNRQLTAAVLIEVPEDEVVQRLLSRLICPKCGRSYNMIFLPPKEDELCDDCGVGLVQRLDDKEETVRHRLKVYREKTQPVIDYYSKKGILKRVDGSQGIDNVVAEVLGILGWSDK

SEQ ID NO: 1581 - DNA, 693 bp, synthetic construct
  misc_feature 1..693: note = variant of adenylate kinase from Thermotoga neapolitana
  source 1..693: mol_type = other DNA
atgcaccatcatcaccatcacgggggctccggcatgggggcatatctggtgttcttaggtccgccgggcgcgggaaaaggtacccaaggccgtattatttcggcaaagactggcatcccgcatattagcacgggcgatatcctgcgtgacatcgtcgctaagcaaaacgatgaagttgcctcgagcattaaagagatcatggagaaaggtgaactcgttccagatgaactgggtaatgcggtagtaaaacgccgcctgtcggagaaagactgcgaaaaaggctttattttggatggtttcccgcgtaccgtgcgccaagcggaatatctggatagttttcttgaaagccagaatcgccagttgacagccgccgtgctgattgaggtccccgaagatgaagttgttcagcgtctgctgtctcgcctgatctgtccgaaatgcgggcgtatctacaacatgatttttctgccaccaaaagaagacgagctgtgtgacgattgcggtgtcggcttagtacagcgtttagatgataaggaagaaacggtccgtcaccgcctgaaagtctaccgtgagaagacccagccggtcattgactattatagtaagaaaggtattctcaaacgcgtagatgggtcgcaaggaatcgacaacgttcctgcagaagtcctggggattctgggttggagcgataag

SEQ ID NO: 1582 - protein, 231 aa, synthetic construct
  REGION 1..231: note = variant of adenylate kinase from Thermotoga neapolitana
MHHHHHHGGSGMGAYLVFLGPPGAGKGTQGRIISAKTGIPHISTGDILRDIVAKQNDEVASSIKEIMEKGELVPDELGNAVVKRRLSEKDCEKGFILDGFPRTVRQAEYLDSFLESQNRQLTAAVLIEVPEDEVVQRLLSRLICPKCGRIYNMIFLPPKEDELCDDCGVGLVQRLDDKEETVRHRLKVYREKTQPVIDYYSKKGILKRVDGSQGIDNVPAEVLGILGWSDK

SEQ ID NO: 1583 - DNA, 693 bp, synthetic construct
  misc_feature 1..693: note = variant of adenylate kinase from Thermotoga neapolitana
  source 1..693: mol_type = other DNA
atgcaccatcatcaccatcacgggggctccggcatgggggcatatctggtgttcttaggtccgccgggcgcgggaaaaggtacccaaggccgtattatttcggcaaagactggcatcccgcatattagcacgggcgatatcctgcgtgacatcgtcgctaagcaaaacgatgaagttgcctcgagcattaaagagatcatggagaaaggtgaactcgttccagatgaactgggtaatgcggtagtaaaacgccgcctgtcggagaaagactgcgaaaaaggctttattttggatggtttcccgcgtaccgtgcgccaagcggaatatctggatagttttcttgaaagccagaatcgccagttgacagccgccgtgctgattgaggtccccgaagatgaagttgttcagcgtctgctgtctcgcctgatctgtccgaaatgcgggcgtccgtacaacatgatttttctgccaccaaaagaagacgagctgtgtgacgattgcggtgtcggcttagtacagcgtttagatgataaggaagaaacggtccgtcaccgcctgaaagtctaccgtgagaagacccagccggtcattgactattatagtaagaaaggtattctcaaacgcgtagatgggtcgcaaggaatcgacaacgttgtggcagaagtcctggggattctgggttggagcgataag

SEQ ID NO: 1584 - protein, 231 aa, synthetic construct
  REGION 1..231: note = variant of adenylate kinase from Thermotoga neapolitana
MHHHHHHGGSGMGAYLVFLGPPGAGKGTQGRIISAKTGIPHISTGDILRDIVAKQNDEVASSIKEIMEKGELVPDELGNAVVKRRLSEKDCEKGFILDGFPRTVRQAEYLDSFLESQNRQLTAAVLIEVPEDEVVQRLLSRLICPKCGRPYNMIFLPPKEDELCDDCGVGLVQRLDDKEETVRHRLKVYREKTQPVIDYYSKKGILKRVDGSQGIDNVVAEVLGILGWSDK

SEQ ID NO: 1585 - DNA, 693 bp, synthetic construct
  misc_feature 1..693: note = variant of adenylate kinase from Thermotoga neapolitana
  source 1..693: mol_type = other DNA
atgcaccatcatcaccatcacgggggctccggcatgggggcatatctggtgttcttaggtccgccgggcgcgggaaaaggtacccaaggccgtattatttcggcaaagactggcatcccgcatattagcacgggcgatatcctgcgtgacatcgtcgctaagcaaaacgatgaagttgcctcgagcattaaagagatcatggagaaaggtgaactcgttccagatgaactgggtaatgcggtagtaaaacgccgcctgtcggagaaagactgcgaaaaaggctttattttggatggtttcccgcgtaccgtgcgccaagcggaatatctggatagttttcttgaaagccagaatcgccagttgacagccgccgtgctgattgaggtccccgaagatgaagttgttcagcgtctgctgtctcgcctgatctgtccgaaatgcgggcgtatctacaacatgatttttctgccaccaaaagaagacgagctgtgtgacgattgcggtgtcggcttagtacagcgtttagatgataaggaagaaacggtccgtcaccgcctgaaagtctaccgtgagaagacccagccggtcattgactattatagtaagaaaggtattctcaaacgcgtagatgggtcgcaaggaatcgaccatgttgtggcagaagtcctggggattctgggttggagcgataag

SEQ ID NO: 1586 - protein, 231 aa, synthetic construct
  REGION 1..231: note = variant of adenylate kinase from Thermotoga neapolitana
MHHHHHHGGSGMGAYLVFLGPPGAGKGTQGRIISAKTGIPHISTGDILRDIVAKQNDEVASSIKEIMEKGELVPDELGNAVVKRRLSEKDCEKGFILDGFPRTVRQAEYLDSFLESQNRQLTAAVLIEVPEDEVVQRLLSRLICPKCGRIYNMIFLPPKEDELCDDCGVGLVQRLDDKEETVRHRLKVYREKTQPVIDYYSKKGILKRVDGSQGIDHVVAEVLGILGWSDK

SEQ ID NO: 1587 - DNA, 693 bp, synthetic construct
  misc_feature 1..693: note = variant of adenylate kinase from Thermotoga neapolitana
  source 1..693: mol_type = other DNA
atgcaccatcatcaccatcacgggggctccggcatgggggcatatctggtgttcttaggtccgccgggcgcgggaaaaggtacccaaggccgtattatttcggcaaagactggcatcccgcatattagcacgggcgatatcctgcgtgacatcgtcgctaagcaaaacgatgaagttgcctcgagcattaaagagatcatggagaaaggtgaactcgttccagatgaactgggtaatgcggtagtaaaacgccgcctgtcggagaaagactgcgaaaaaggctttattttggatggtttcccgcgtaccgtgcgccaagcggaatatctggatagttttcttgaaagccagaatcgccagttgacagccgccgtgctgattgaggtccccgaagatgaagttgttcagcgtctgctgtctcgcctgatctgtccgaaatgcgggcgtatctacaacatgatttttctgccaccaaaagaagacgagctgtgtgacgattgcggtgtcggcttagtacagcgtttagatgataaggaagaaacggtccgtcaccgcctgaaagtctaccgtgagaagacccagccggtcattgactattatagtaagaaaggtattctcaaacgcgtagatgggtcgcaaggaatcgacaacgttgtggcagaagtcctggggattacgggttggagcgataag

SEQ ID NO: 1588 - protein, 231 aa, synthetic construct
  REGION 1..231: note = variant of adenylate kinase from Thermotoga neapolitana
MHHHHHHGGSGMGAYLVFLGPPGAGKGTQGRIISAKTGIPHISTGDILRDIVAKQNDEVASSIKEIMEKGELVPDELGNAVVKRRLSEKDCEKGFILDGFPRTVRQAEYLDSFLESQNRQLTAAVLIEVPEDEVVQRLLSRLICPKCGRIYNMIFLPPKEDELCDDCGVGLVQRLDDKEETVRHRLKVYREKTQPVIDYYSKKGILKRVDGSQGIDNVVAEVLGITGWSDK

SEQ ID NO: 1589 - DNA, 693 bp, synthetic construct
  misc_feature 1..693: note = variant of adenylate kinase from Thermotoga neapolitana
  source 1..693: mol_type = other DNA
atgcaccatcatcaccatcacgggggctccggcatgggggcatatctggtgttcttaggtccgccgggcgcgggaaaaggtacccaaggccgtattatttcggcaaagactggcatcccgcatattagcacgggcgatatcctgcgtgacatcgtcgctaagcaaaacgatgaagttgcctcgagcattaaagagatcatggagaaaggtgaactcgttccagatgaactgggtaatgcggtagtaaaacgccgcctgtcggagaaagactgcgaaaaaggctttattttggatggtttcccgcgtaccgtgcgccaagcggaatatctggatagttttcttgaaagccagaatcgccagttgacagccgccgtgctgattgaggtccccgaagatgaagttgttcagcgtctgctgtctcgcctggggtgtccgaaatgcgggcgtatctacaacatgatttttctgccaccaaaagaagacgagctgtgtgacgattgcggtgtcggcttagtacagcgtttagatgataaggaagaaacggtccgtcaccgcctgaaagtctaccgtgagaagacccagccggtcattgactattatagtaagaaaggtattctcaaacgcgtagatgggtcgcaaggaatcgacaacgttgtggcagaagtcctggggattctgggttggagcgataag

SEQ ID NO: 1590 - protein, 231 aa, synthetic construct
  REGION 1..231: note = variant of adenylate kinase from Thermotoga neapolitana
MHHHHHHGGSGMGAYLVFLGPPGAGKGTQGRIISAKTGIPHISTGDILRDIVAKQNDEVASSIKEIMEKGELVPDELGNAVVKRRLSEKDCEKGFILDGFPRTVRQAEYLDSFLESQNRQLTAAVLIEVPEDEVVQRLLSRLGCPKCGRIYNMIFLPPKEDELCDDCGVGLVQRLDDKEETVRHRLKVYREKTQPVIDYYSKKGILKRVDGSQGIDNVVAEVLGILGWSDK

SEQ ID NO: 1591 - DNA, 693 bp, synthetic construct
  misc_feature 1..693: note = variant of adenylate kinase from Thermotoga neapolitana
  source 1..693: mol_type = other DNA
atgcaccatcatcaccatcacgggggctccggcatgggggcatatctggtgttcttaggtccgccgggcgcgggaaaaggtacccaaggccgtattatttcggcaaagactggcatcccgcatattagcacgggcgatatcctgcgtgacatcgtcgctaagcaaaacgatgaagttgcctcgagcattaaagagatcatggagaaaggtgaactcgttccagatgaactgggtaatgcggtagtaaaacgccgcctgtcggagaaagactgcgaaaaaggctttattttggatggtttcccgcgtaccgtgcgccaagcggaatatctggatagttttcttgaaagccagaatcgccagttgacagccgccgtgctgattgaggtccccgaagatgaagttgttcagcgtctgctgtctcgcctgatctgtccgaaatgcgggcgtatctacaacatgatttttctgccaccaaaagaagacgagctgtgtgacgattgcggtgtcggcttagtacagcgtttagatgataaggaagaaacggtccgtcaccgcctgaaagtctaccgtgagaagacccagccggtcattgactattatagtaagaaaggtattctcaaacgcgtagatgggtcgcaaggaatcgacaaccttgtggcagaagtcctggggattctgggttggagcgataag

SEQ ID NO: 1592 - protein, 231 aa, synthetic construct
  REGION 1..231: note = variant of adenylate kinase from Thermotoga neapolitana
MHHHHHHGGSGMGAYLVFLGPPGAGKGTQGRIISAKTGIPHISTGDILRDIVAKQNDEVASSIKEIMEKGELVPDELGNAVVKRRLSEKDCEKGFILDGFPRTVRQAEYLDSFLESQNRQLTAAVLIEVPEDEVVQRLLSRLICPKCGRIYNMIFLPPKEDELCDDCGVGLVQRLDDKEETVRHRLKVYREKTQPVIDYYSKKGILKRVDGSQGIDNLVAEVLGILGWSDK

SEQ ID NO: 1593 - DNA, 693 bp, synthetic construct
  misc_feature 1..693: note = variant of adenylate kinase from Thermotoga neapolitana
  source 1..693: mol_type = other DNA
atgcaccatcatcaccatcacgggggctccggcatgggggcatatctggtgttcttaggtccgccgggcgcgggaaaaggtacccaaggccgtattatttcggcaaagactggcatcccgcatattagcacgggcgatatcctgcgtgacatcgtcgctaagcaaaacgatgaagttgcctcgagcattaaagagatcatgtcgaaaggtgaactcgttccagatgaactgggtaatgcggtagtaaaacgccgcctgtcggagaaagactgcgaaaaaggctttattttggatggtttcccgcgtaccgtgcgccaagcggaatatctggatagttttcttgaaagccagaatcgccagttgacagccgccgtgctgattgaggtccccgaagatgaagttgttcagcgtctgctgtctcgcctgatctgtccgaaatgcgggcgtatctacaacatgatttttctgccaccaaaagaagacgagctgtgtgacgattgcggtgtcggcttagtacagcgtttagatgataaggaagaaacggtccgtcaccgcctgaaagtctaccgtgagaagacccagccggtcattgactattatagtaagaaaggtattctcaaacgcgtagatgggtcgcaaggaatcgacaacgttgtggcagaagtcctggggattctgggttggagcgataag

SEQ ID NO: 1594 - protein, 231 aa, synthetic construct
  REGION 1..231: note = variant of adenylate kinase from Thermotoga neapolitana
MHHHHHHGGSGMGAYLVFLGPPGAGKGTQGRIISAKTGIPHISTGDILRDIVAKQNDEVASSIKEIMSKGELVPDELGNAVVKRRLSEKDCEKGFILDGFPRTVRQAEYLDSFLESQNRQLTAAVLIEVPEDEVVQRLLSRLICPKCGRIYNMIFLPPKEDELCDDCGVGLVQRLDDKEETVRHRLKVYREKTQPVIDYYSKKGILKRVDGSQGIDNVVAEVLGILGWSDK

SEQ ID NO: 1595 - DNA, 693 bp, synthetic construct
  misc_feature 1..693: note = variant of adenylate kinase from Thermotoga neapolitana
  source 1..693: mol_type = other DNA
atgcaccatcatcaccatcacgggggctccggcatgggggcatatctggtgttcttaggtccgccgggcgcgggaaaaggtacccaaggccgtattatttcggcaaagactggcatcccgcatattagcacgggcgatatcctgcgtgacatcgtcgctaagcaaaacgatgaagttgcctcgagcattaaagagatcatggagaaaggtgaactcgttccagatgaactgggtaatgcggtagtaaaacgccgcctgtcggagaaagactgcgaaaaaggctttattttggatggtttcccgcgtaccgtgcgccaagcggaatatctggatagttttcttgaaagccagaatcgccagttgacagccgccgtgctgattgaggtccccgaagatgaagttgttcagcgtctgctgtctcgccgtatctgtccgaaatgcgggcgtatctacaacatgatttttctgccaccaaaagaagacgagctgtgtgacgattgcggtgtcggcttagtacagcgtttagatgataaggaagaaacggtccgtcaccgcctgaaagtctaccgtgagaagacccagccggtcattgactattatagtaagaaaggtattctcaaacgcgtagatgggtcgcaaggaatcgacaacgttgtggcagaagtcctggggattctgggttggagcgataag

SEQ ID NO: 1596 - protein, 231 aa, synthetic construct
  REGION 1..231: note = variant of adenylate kinase from Thermotoga neapolitana
MHHHHHHGGSGMGAYLVFLGPPGAGKGTQGRIISAKTGIPHISTGDILRDIVAKQNDEVASSIKEIMEKGELVPDELGNAVVKRRLSEKDCEKGFILDGFPRTVRQAEYLDSFLESQNRQLTAAVLIEVPEDEVVQRLLSRRICPKCGRIYNMIFLPPKEDELCDDCGVGLVQRLDDKEETVRHRLKVYREKTQPVIDYYSKKGILKRVDGSQGIDNVVAEVLGILGWSDK

SEQ ID NO: 1597 - DNA, 693 bp, synthetic construct
  misc_feature 1..693: note = variant of adenylate kinase from Thermotoga neapolitana
  source 1..693: mol_type = other DNA
atgcaccatcatcaccatcacgggggctccggcatgggggcatatctggtgttcttaggtccgccgggcgcgggaaaaggtacccaaggccgtattatttcggcaaagactggcatcccgcatattagcacgggcgatatcctgcgtgacatcgtcgctaagcaaaacgatgaagttgcctcgagcattaaagagatcatggagaaaggtgaactcgttccagatgaactgggtaatgcggtagtaaaacgccgcctgtcggagaaagactgcgaaaaaggctttattttggatggtttcccgcgtaccgtgcgccaagcggaatatctggatagttttcttgaaagccagaatcgccagttgacagccgccgtgctgattgaggtccccgaagatgaagttgttcagcgtctgctgtctcgcctgatctgtccgaaatgcgggcgtatctacaacatgatttttctgccaccaaaagaagacgagctgtgtgacgattgcggtgtcggcttagtacagcgtttagatgataaggaagaaacggtccgtcaccgcctgaaagtctaccgtgagaagacccagccggtcattgactattatagtaagaaaggtattctcaaacgcgtagatgggattcaaggaatcgacaacgttgtggcagaagtcctggggattctgggttggagcgataag

SEQ ID NO: 1598 - protein, 231 aa, synthetic construct
  REGION 1..231: note = variant of adenylate kinase from Thermotoga neapolitana
MHHHHHHGGSGMGAYLVFLGPPGAGKGTQGRIISAKTGIPHISTGDILRDIVAKQNDEVASSIKEIMEKGELVPDELGNAVVKRRLSEKDCEKGFILDGFPRTVRQAEYLDSFLESQNRQLTAAVLIEVPEDEVVQRLLSRLICPKCGRIYNMIFLPPKEDELCDDCGVGLVQRLDDKEETVRHRLKVYREKTQPVIDYYSKKGILKRVDGIQGIDNVVAEVLGILGWSDK

SEQ ID NO: 1599 - DNA, 693 bp, synthetic construct
  misc_feature 1..693: note = variant of adenylate kinase from Thermotoga neapolitana
  source 1..693: mol_type = other DNA
atgcaccatcatcaccatcacgggggctccggcatgggggcatatctggtgttcttaggtccgccgggcgcgggaaaaggtacccaaggccgtattatttcggcaaagactggcatcccgcatattagcacgggcgatatcctgcgtgacatcgtcgctaagcaaaacgatgaagttgcctcgagcattaaagagatcatggagaaaggtgaactcgttccagatgaactgggtaatgcggtagtaaaacgccgcctgtcggagaaagactgcgaaaaaggctttattttggatggtttcccgcgtaccgtgcgccaagcggaatatctggatagttttcttgaaagccagaatcgccagttgacagccgccgtgctgattgaggtccccgaagatgaagttgttcagcgtctgctgtctcgcctgatctgtccgaaatgcgggcgtatctacaacatgatttttctgccaccaaaagaagacgagctgtgtgacgattgcggtgtcggcttagtacagcgtttagatgataaggaagaaacggtccgtcaccgcctgaaagtctaccgtgagaagacccagccggtcattgactattatagtaagaaaggtattctcaaacgcgtagatgggctgcaaggaatcgacaacgttgtggcagaagtcctggggattctgggttggagcgataag

SEQ ID NO: 1600 - protein, 231 aa, synthetic construct
  REGION 1..231: note = variant of adenylate kinase from Thermotoga neapolitana
MHHHHHHGGSGMGAYLVFLGPPGAGKGTQGRIISAKTGIPHISTGDILRDIVAKQNDEVASSIKEIMEKGELVPDELGNAVVKRRLSEKDCEKGFILDGFPRTVRQAEYLDSFLESQNRQLTAAVLIEVPEDEVVQRLLSRLICPKCGRIYNMIFLPPKEDELCDDCGVGLVQRLDDKEETVRHRLKVYREKTQPVIDYYSKKGILKRVDGLQGIDNVVAEVLGILGWSDK

SEQ ID NO: 1601 - DNA, 693 bp, synthetic construct
  misc_feature 1..693: note = variant of adenylate kinase from Thermotoga neapolitana
  source 1..693: mol_type = other DNA
atgcaccatcatcaccatcacgggggctccggcatgggggcatatctggtgttcttaggtccgccgggcgcgggaaaaggtacccaaggccgtattatttcggcaaagactggcatcccgcatattagcacgggcgatatcctgcgtgacatcgtcgctaagcaaaacgatgaagttgcctcgagcattaaagagatcatggagaaaggtgaactcgttccagatgaactgggtaatgcggtagtaaaacgccgcctgtcggagaaagactgcgaaaaaggctttattttggatggtttcccgcgtaccgtgcgccaagcggaatatctggatagttttcttgaaagccagaatcgccagttgacagccgccgtgctgattgaggtccccgaagatgaagttgttcagcgtctgctgtctcgcctgatctgtccgaaatgcgggcgtatctacaacatgatttttctgccaccaaaagaagacgagctgtgtgacgattgcggtgtcggcttagtacagcgtttagatgataaggaagaaacggtccgtcaccgcctgaaagtctaccgtgagaagacccagccggtcattgactattatagtaagaaaggtattctcaaacgcgtagatgggtcgcaaggaatcgacaacgttgtggcagaagtcctggggattctgggtcctagcgataag

SEQ ID NO: 1602 - protein, 231 aa, synthetic construct
  REGION 1..231: note = variant of adenylate kinase from Thermotoga neapolitana
MHHHHHHGGSGMGAYLVFLGPPGAGKGTQGRIISAKTGIPHISTGDILRDIVAKQNDEVASSIKEIMEKGELVPDELGNAVVKRRLSEKDCEKGFILDGFPRTVRQAEYLDSFLESQNRQLTAAVLIEVPEDEVVQRLLSRLICPKCGRIYNMIFLPPKEDELCDDCGVGLVQRLDDKEETVRHRLKVYREKTQPVIDYYSKKGILKRVDGSQGIDNVVAEVLGILGPSDK

SEQ ID NO: 1603 - DNA, 693 bp, synthetic construct
  misc_feature 1..693: note = variant of adenylate kinase from Thermotoga neapolitana
  source 1..693: mol_type = other DNA
atgcaccatcatcaccatcacgggggctccggcatgggggcatatctggtgttcttaggtccgccgggcgcgggaaaaggtacccaaggccgtattatttcggcaaagactggcatcccgcatattagcacgggcgatatcctgcgtgacatcgtcgctaagcaaaacgatgaagttgcctcgagcattaaagagatcatggagaaaggtgaactcgttccagatgaactgggtaatgcggtagtaaaacgccgcctgtcggagaaagactgcgaaaaaggctttattttggatggtttcccgcgtaccgtgcgccaagcggaatatctggatagttttcttgaaagccagaatcgccagttgacagccgccgtgctgattgaggtccccgaagatgaagttgttcagcgtctgctgtctcgcctgatctgtccgaaatgcgggcgtatctacaacatgatttttctgccaccaaaagaagacgagctgtgtgacgattgcggtgtcggcttagtacagcgtttagatgataaggaagaaacggtccgtcaccgcctgaaagtctaccgtgagaagacccagccggtcattgactattatagtaagaaaggtattctcaaacgcgtagatgggtcgtcgggaatcgacaacgttgtggcagaagtcctggggattctgggttggagcgataag

SEQ ID NO: 1604 - protein, 231 aa, synthetic construct
  REGION 1..231: note = variant of adenylate kinase from Thermotoga neapolitana
MHHHHHHGGSGMGAYLVFLGPPGAGKGTQGRIISAKTGIPHISTGDILRDIVAKQNDEVASSIKEIMEKGELVPDELGNAVVKRRLSEKDCEKGFILDGFPRTVRQAEYLDSFLESQNRQLTAAVLIEVPEDEVVQRLLSRLICPKCGRIYNMIFLPPKEDELCDDCGVGLVQRLDDKEETVRHRLKVYREKTQPVIDYYSKKGILKRVDGSSGIDNVVAEVLGILGWSDK

SEQ ID NO: 1605 - DNA, 693 bp, synthetic construct
  misc_feature 1..693: note = variant of adenylate kinase from Thermotoga neapolitana
  source 1..693: mol_type = other DNA
atgcaccatcatcaccatcacgggggctccggcatgggggcatatctggtgttcttaggtccgccgggcgcgggaaaaggtacccaaggccgtattatttcggcaaagactggcatcccgcatattagcacgggcgatatcctgcgtgacatcgtcgctaagcaaaacgatgaagttgcctcgagcattaaagagatcatggagaaaggtgaactcgttccagatgaactgggtaatgcggtagtaaaacgccgcctgtcggagaaagactgcgaaaaaggctttattttggatggtttcccgcgtaccgtgcgccaagcggaatatctggatagttttcttgaaagccagaatcgccagttgacagccgccgtgctgattgaggtccccgaagatgaagttgttcagcgtctgctgtctcgcctgatctgtccgaaatgcgggcgtatctacaacatgatttttctgccaccaaaagaagacgagctgtgtgacgattgcggtgtcggcttagtacagcgtttagatgataaggaagaaacggtccgtcaccgcctgaaagtctaccgtgagaagacccagccggtcattgactattatagtaagaaaggtattctcaaacgcgtagatgggtcgcaaggaatcgacaacgttgtggcagaagtcctggggatttcgggttggagcgataag

SEQ ID NO: 1606 - protein, 231 aa, synthetic construct
  REGION 1..231: note = variant of adenylate kinase from Thermotoga neapolitana
MHHHHHHGGSGMGAYLVFLGPPGAGKGTQGRIISAKTGIPHISTGDILRDIVAKQNDEVASSIKEIMEKGELVPDELGNAVVKRRLSEKDCEKGFILDGFPRTVRQAEYLDSFLESQNRQLTAAVLIEVPEDEVVQRLLSRLICPKCGRIYNMIFLPPKEDELCDDCGVGLVQRLDDKEETVRHRLKVYREKTQPVIDYYSKKGILKRVDGSQGIDNVVAEVLGISGWSDK

SEQ ID NO: 1607 - DNA, 693 bp, synthetic construct
  misc_feature 1..693: note = variant of adenylate kinase from Thermotoga neapolitana
  source 1..693: mol_type = other DNA
atgcaccatcatcaccatcacgggggctccggcatgggggcatatctggtgttcttaggtccgccgggcgcgggaaaaggtacccaaggccgtattatttcggcaaagactggcatcccgcatattagcacgggcgatatcctgcgtgacatcgtcgctaagcaaaacgatgaagttgcctcgagcattaaagagatcatggagaaaggtgaactcgttccagatgaactgggtaatgcggtagtaaaacgccgcctgtcggagaaagactgcgaaaaaggctttattttggatggtttcccgcgtaccgtgcgccaagcggaatatctggatagttttcttgaaagccagaatcgccagttgacagccgccgtgctgattgaggtccccgaagatgaagttgttcagcgtctgctgtctcgcctgatctgtccgaaatgcgggcgtatctacaacatgatttttactccaccaaaagaagacgagctgtgtgacgattgcggtgtcggcttagtacagcgtttagatgataaggaagaaacggtccgtcaccgcctgaaagtctaccgtgagaagacccagccggtcattgactattatagtaagaaaggtattctcaaacgcgtagatgggtcgcaaggaatcgacaacgttgtggcagaagtcctggggattctgggttggagcgataag

SEQ ID NO: 1608 - protein, 231 aa, synthetic construct
  REGION 1..231: note = variant of adenylate kinase from Thermotoga neapolitana
MHHHHHHGGSGMGAYLVFLGPPGAGKGTQGRIISAKTGIPHISTGDILRDIVAKQNDEVASSIKEIMEKGELVPDELGNAVVKRRLSEKDCEKGFILDGFPRTVRQAEYLDSFLESQNRQLTAAVLIEVPEDEVVQRLLSRLICPKCGRIYNMIFTPPKEDELCDDCGVGLVQRLDDKEETVRHRLKVYREKTQPVIDYYSKKGILKRVDGSQGIDNVVAEVLGILGWSDK

SEQ ID NO: 1609 - DNA, 693 bp, synthetic construct
  misc_feature 1..693: note = variant of adenylate kinase from Thermotoga neapolitana
  source 1..693: mol_type = other DNA
atgcaccatcatcaccatcacgggggctccggcatgggggcatatctggtgttcttaggtccgccgggcgcgggaaaaggtacccaaggccgtattatttcggcaaagactggcatcccgcatattagcacgggcgatatcctgcgtgacatcgtcgctaagcaaaacgatgaagttgcctcgagcattaaagagatcatggagaaaggtgaactcgttccagatgaactgggtccggcggtagtaaaacgccgcctgtcggagaaagactgcgaaaaaggctttattttggatggtttcccgcgtaccgtgcgccaagcggaatatctggatagttttcttgaaagccagaatcgccagttgacagccgccgtgctgattgaggtccccgaagatgaagttgttcagcgtctgctgtctcgcctgatctgtccgaaatgcgggcgtatctacaacatgatttttctgccaccaaaagaagacgagctgtgtgacgattgcggtgtcggcttagtacagcgtttagatgataaggaagaaacggtccgtcaccgcctgaaagtctaccgtgagaagacccagccggtcattgactattatagtaagaaaggtattctcaaacgcgtagatgggtcgcaaggaatcgacaacgttgtggcagaagtcctggggattctgggttggagcgataag

SEQ ID NO: 1610 - protein, 231 aa, synthetic construct
  REGION 1..231: note = variant of adenylate kinase from Thermotoga neapolitana
MHHHHHHGGSGMGAYLVFLGPPGAGKGTQGRIISAKTGIPHISTGDILRDIVAKQNDEVASSIKEIMEKGELVPDELGPAVVKRRLSEKDCEKGFILDGFPRTVRQAEYLDSFLESQNRQLTAAVLIEVPEDEVVQRLLSRLICPKCGRIYNMIFLPPKEDELCDDCGVGLVQRLDDKEETVRHRLKVYREKTQPVIDYYSKKGILKRVDGSQGIDNVVAEVLGILGWSDK

SEQ ID NO: 1611 - DNA, 693 bp, synthetic construct
  misc_feature 1..693: note = variant of adenylate kinase from Thermotoga neapolitana
  source 1..693: mol_type = other DNA
atgcaccatcatcaccatcacgggggctccggcatgggggcatatctggtgttcttaggtccgccgggcgcgggaaaaggtacccaaggccgtattatttcggcaaagactggcatcccgcatattagcacgggcgatatcctgcgtgacatcgtcgctaagcaaaacgatgaagttgcctcgagcattaaagagatcatggagaaaggtgaactcgttccagatgaactgggtaatgcggtagtaaaacgccgcctgtcggagaaagactgcgaaaaaggctttattttggatggtttcccgcgtaccgtgcgccaagcggaatatctggatagttttcttgaaagccagaatcgccagttgacagccgccgtgctgattgaggtccccgaagatgaagttgttcagcgtctgctgtctcgcctgatctgtccgaaatgcgggcgtatctacaacatgatttttctgccaccaaaagaagacgagctgtgtgacgattgcggtgtcggcttagtacagcgtttagatgataaggaagaaacggtccgtcaccgcctgaaagtctaccgtgagaagacccagccggtcattgactattatagtaagaaaggtattctcaaacgcgtagatgggtcgcaaggaatcgacaacgttgtggcagaagtcctggggattctgggttggagcgctaag

SEQ ID NO: 1612 - protein, 231 aa, synthetic construct
  REGION 1..231: note = variant of adenylate kinase from Thermotoga neapolitana
MHHHHHHGGSGMGAYLVFLGPPGAGKGTQGRIISAKTGIPHISTGDILRDIVAKQNDEVASSIKEIMEKGELVPDELGNAVVKRRLSEKDCEKGFILDGFPRTVRQAEYLDSFLESQNRQLTAAVLIEVPEDEVVQRLLSRLICPKCGRIYNMIFLPPKEDELCDDCGVGLVQRLDDKEETVRHRLKVYREKTQPVIDYYSKKGILKRVDGSQGIDNVVAEVLGILGWSAK

SEQ ID NO: 1613 - DNA, 693 bp, synthetic construct
  misc_feature 1..693: note = variant of adenylate kinase from Thermotoga neapolitana
  source 1..693: mol_type = other DNA
atgcaccatcatcaccatcacgggggctccggcatgggggcatatctggtgttcttaggtccgccgggcgcgggaaaaggtacccaaggccgtattatttcggcaaagactggcatcccgcatattagcacgggcgatatcctgcgtgacatcgtcgctaagcaaaacgatgaagttgcctcgagcattaaagagatcatggagaaaggtgaactcgttccagatgaactgggtaatgcggtagtaaaacgccgcctgtcggagaaagactgcgaaaaaggctttattttggatggtttcccgcgtaccgtgcgccaagcggaatatctggatagttttcttgaaagccagaatcgccagttgacagccgccgtgctgattgaggtccccgaagatgaagttgttcagcgtctgctgtctcgcctgatctgtccgaaatgcgggcgtatctacaacatgatttttctgccaccaaaagaagacgagctgtgtgacgattgcggtgtcggcttagtacagcgtttagatgataaggaagaaacggtccgtcaccgcctgaaagtctaccgtgagaagacccagccggtcattgactattatagtaagaaaggtattctcaaacgcgtagatgggtcgcaaggaatcgacaacgcggtggcagaagtcctggggattctgggttggagcgataag

SEQ ID NO: 1614 - protein, 231 aa, synthetic construct
  REGION 1..231: note = variant of adenylate kinase from Thermotoga neapolitana
MHHHHHHGGSGMGAYLVFLGPPGAGKGTQGRIISAKTGIPHISTGDILRDIVAKQNDEVASSIKEIMEKGELVPDELGNAVVKRRLSEKDCEKGFILDGFPRTVRQAEYLDSFLESQNRQLTAAVLIEVPEDEVVQRLLSRLICPKCGRIYNMIFLPPKEDELCDDCGVGLVQRLDDKEETVRHRLKVYREKTQPVIDYYSKKGILKRVDGSQGIDNAVAEVLGILGWSDK

SEQ ID NO: 1615 - DNA, 693 bp, synthetic construct
  misc_feature 1..693: note = variant of adenylate kinase from Thermotoga neapolitana
  source 1..693: mol_type = other DNA
atgcaccatcatcaccatcacgggggctccggcatgggggcatatctggtgttcttaggtccgccgggcgcgggaaaaggtacccaaggccgtattatttcggcaaagactggcatcccgcatattagcacgggcgatatcctgcgtgacatcgtcgctaagcaaaacgatgaagttgcctcgagcattaaagagatcatggagaaaggtgaactcgttccagatgaactgggtaatgcggtagtaaaacgccgcctgtcggagaaagactgcgaaaaaggctttattttggatggtttcccgcgtaccgtgcgccaagcggaatatctggatagttttcttgaaagccagaatcgccagttgacagccgccgtgctgattgaggtccccgaagatgaagttgttcagcgtctgctgtctcgcctgcggtgtccgaaatgcgggcgtatctacaacatgatttttctgccaccaaaagaagacgagctgtgtgacgattgcggtgtcggcttagtacagcgtttagatgataaggaagaaacggtccgtcaccgcctgaaagtctaccgtgagaagacccagccggtcattgactattatagtaagaaaggtattctcaaacgcgtagatgggtcgcaaggaatcgacaacgttgtggcagaagtcctggggattctgggttggagcgataag

SEQ ID NO: 1616 - protein, 231 aa, synthetic construct
  REGION 1..231: note = variant of adenylate kinase from Thermotoga neapolitana
MHHHHHHGGSGMGAYLVFLGPPGAGKGTQGRIISAKTGIPHISTGDILRDIVAKQNDEVASSIKEIMEKGELVPDELGNAVVKRRLSEKDCEKGFILDGFPRTVRQAEYLDSFLESQNRQLTAAVLIEVPEDEVVQRLLSRLRCPKCGRIYNMIFLPPKEDELCDDCGVGLVQRLDDKEETVRHRLKVYREKTQPVIDYYSKKGILKRVDGSQGIDNVVAEVLGILGWSDK

SEQ ID NO: 1617 - DNA, 693 bp, synthetic construct
  misc_feature 1..693: note = variant of adenylate kinase from Thermotoga neapolitana
  source 1..693: mol_type = other DNA
atgcaccatcatcaccatcacgggggctccggcatgggggcatatctggtgttcttaggtccgccgggcgcgggaaaaggtacccaaggccgtattatttcggcaaagactggcatcccgcatattagcacgggcgatatcctgcgtgacatcgtcgctaagcaaaacgatgaagttgcctcgagcattaaagagatcatggagaaaggtgaactcgttccagatgaactgggtaatgcggtagtaaaacgccgcctgtcggagaaagactgcgaaaaaggctttattttggatggtttcccgcgtaccgtgcgccaagcggaatatctggatagttttcttgaaagccagaatcgccagttgacagccgccgtgctgattgaggtccccgaagatgaagttgttcagcgtctgctgtctcgcctgatctgtccgaaatgcgggcgtatctacaacatgatttttctgccaccaaaagaagacgagctgtgtgacgattgcggtgtcggcttagtacagcgtttagatgataaggaagaaacggtccgtcaccgcctgaaagtctaccgtgagaagacccagccggtcattgactattatagtaagaaaggtattctcaaacgcgtagatgggtcgcaaggaatcgacaacgttgtggcagaagtcctggggattctgggttcgagcgataag

SEQ ID NO: 1618 - protein, 231 aa, synthetic construct
  REGION 1..231: note = variant of adenylate kinase from Thermotoga neapolitana
MHHHHHHGGSGMGAYLVFLGPPGAGKGTQGRIISAKTGIPHISTGDILRDIVAKQNDEVASSIKEIMEKGELVPDELGNAVVKRRLSEKDCEKGFILDGFPRTVRQAEYLDSFLESQNRQLTAAVLIEVPEDEVVQRLLSRLICPKCGRIYNMIFLPPKEDELCDDCGVGLVQRLDDKEETVRHRLKVYREKTQPVIDYYSKKGILKRVDGSQGIDNVVAEVLGILGSSDK

SEQ ID NO: 1619 - DNA, 693 bp, synthetic construct
  misc_feature 1..693: note = variant of adenylate kinase from Thermotoga neapolitana
  source 1..693: mol_type = other DNA
atgcaccatcatcaccatcacgggggctccggcatgggggcatatctggtgttcttaggtccgccgggcgcgggaaaaggtacccaaggccgtattatttcggcaaagactggcatcccgcatattagcacgggcgatatcctgcgtgacatcgtcgctaagcaaaacgatgaagttgcctcgagcattaaagagatcatgcttaaaggtgaactcgttccagatgaactgggtaatgcggtagtaaaacgccgcctgtcggagaaagactgcgaaaaaggctttattttggatggtttcccgcgtaccgtgcgccaagcggaatatctggatagttttcttgaaagccagaatcgccagttgacagccgccgtgctgattgaggtccccgaagatgaagttgttcagcgtctgctgtctcgcctgatctgtccgaaatgcgggcgtatctacaacatgatttttctgccaccaaaagaagacgagctgtgtgacgattgcggtgtcggcttagtacagcgtttagatgataaggaagaaacggtccgtcaccgcctgaaagtctaccgtgagaagacccagccggtcattgactattatagtaagaaaggtattctcaaacgcgtagatgggtcgcaaggaatcgacaacgttgtggcagaagtcctggggattctgggttggagcgataag

SEQ ID NO: 1620 - protein, 231 aa, synthetic construct
  REGION 1..231: note = variant of adenylate kinase from Thermotoga neapolitana
MHHHHHHGGSGMGAYLVFLGPPGAGKGTQGRIISAKTGIPHISTGDILRDIVAKQNDEVASSIKEIMLKGELVPDELGNAVVKRRLSEKDCEKGFILDGFPRTVRQAEYLDSFLESQNRQLTAAVLIEVPEDEVVQRLLSRLICPKCGRIYNMIFLPPKEDELCDDCGVGLVQRLDDKEETVRHRLKVYREKTQPVIDYYSKKGILKRVDGSQGIDNVVAEVLGILGWSDK

SEQ ID NO: 1621 - DNA, 693 bp, synthetic construct
  misc_feature 1..693: note = variant of adenylate kinase from Thermotoga neapolitana
  source 1..693: mol_type = other DNA
atgcaccatcatcaccatcacgggggctccggcatgggggcatatctggtgttcttaggtccgccgggcgcgggaaaaggtacccaaggccgtattatttcggcaaagactggcatcccgcatattagcacgggcgatatcctgcgtgacatcgtcgctaagcaaaacgatgaagttgcctcgagcattaaagagatcatggagaaaggtgaactcgttccagatgaactgggtaatgcggtagtaaaacgccgcctgtcggagaaagactgcgaaaaaggctttattttggatggtttcccgcgtaccgtgcgccaagcggaatatctggatagttttcttgaaagccagaatcgccagttgacagccgccgtgctgattgaggtccccgaagatgaagttgttcagcgtctgctgtctcgcctgatctgtccgaaatgcgggcgtatctacaacatgatttttctgccaccaaaagaagacgagctgtgtgacgattgcggtgtcggcttagtacagcgtttagatgataaggaagaaacggtccgtcaccgcctgaaagtctaccgtgagaagacccagccggtcattgactattatagtaagaaaggtattctcactcgcgtagatgggtcgcaaggaatcgacaacgttgtggcagaagtcctggggattctgggttggagcgataag

SEQ ID NO: 1622 - protein, 231 aa, synthetic construct
  REGION 1..231: note = variant of adenylate kinase from Thermotoga neapolitana
MHHHHHHGGSGMGAYLVFLGPPGAGKGTQGRIISAKTGIPHISTGDILRDIVAKQNDEVASSIKEIMEKGELVPDELGNAVVKRRLSEKDCEKGFILDGFPRTVRQAEYLDSFLESQNRQLTAAVLIEVPEDEVVQRLLSRLICPKCGRIYNMIFLPPKEDELCDDCGVGLVQRLDDKEETVRHRLKVYREKTQPVIDYYSKKGILTRVDGSQGIDNVVAEVLGILGWSDK

SEQ ID NO: 1623 - DNA, 693 bp, synthetic construct
  misc_feature 1..693: note = variant of adenylate kinase from Thermotoga neapolitana
  source 1..693: mol_type = other DNA
atgcaccatcatcaccatcacgggggctccggcatgggggcatatctggtgttcttaggtccgccgggcgcgggaaaaggtacccaaggccgtattatttcggcaaagactggcatcccgcatattagcacgggcgatatcctgcgtgacatcgtcgctaagcaaaacgatgaagttgcctcgagcattaaagagatcatggagaaaggtgaactcgttccagatgaactgggtaatgcggtagtaaaacgccgcctgtcggagaaagactgcgaaaaaggctttattttggatggtttcccgcgtaccgtgcgccaagcggaatatctggatagttttcttgaaagccagaatcgccagttgacagccgccgtgctgattgaggtccccgaagatgaagttgttcagcgtctgctgtctcgcctgatctgtccgaaatgcgggcgtatctacaacatgatttttctgccaccaaaagaagacgagctgtgtgacgattgcggtgtcggcttagtacagcgtttagatgataaggaagaaacggtccgtcaccgcctgaaagtctaccgtgagaagacccagccggtcattgactattatagtaagaaaggtattctcaaacgcgtagatgggtcgcaaggaatcgacaacgttgtggcagaagtcctggggattctgggtcggagcgataag

SEQ ID NO: 1624 - protein, 231 aa, synthetic construct
  REGION 1..231: note = variant of adenylate kinase from Thermotoga neapolitana
MHHHHHHGGSGMGAYLVFLGPPGAGKGTQGRIISAKTGIPHISTGDILRDIVAKQNDEVASSIKEIMEKGELVPDELGNAVVKRRLSEKDCEKGFILDGFPRTVRQAEYLDSFLESQNRQLTAAVLIEVPEDEVVQRLLSRLICPKCGRIYNMIFLPPKEDELCDDCGVGLVQRLDDKEETVRHRLKVYREKTQPVIDYYSKKGILKRVDGSQGIDNVVAEVLGILGRSDK

SEQ ID NO: 1625 - DNA, 693 bp, synthetic construct
  misc_feature 1..693: note = variant of adenylate kinase from Thermotoga neapolitana
  source 1..693: mol_type = other DNA
atgcaccatcatcaccatcacgggggctccggcatgggggcatatctggtgttcttaggtccgccgggcgcgggaaaaggtacccaaggccgtattatttcggcaaagactggcatcccgcatattagcacgggcgatatcctgcgtgacatcgtcgctaagcaaaacgatgaagttgcctcgagcattaaagagatcatggagaaaggtgaactcgttccagatgaactgggtaatgcggtagtaaaacgccgcctgtcggagaaagactgcgaaaaaggctttattttggatggtttcccgcgtaccgtgcgccaagcggaatatctggatagttttcttgaaagccagaatcgccagttgacagccgccgtgctgattgaggtccccgaagatgaagttgttcagcgtctgctgtctcgcctgatctgtccgaaatgcgggcgtatctacaacatgattgctctgccaccaaaagaagacgagctgtgtgacgattgcggtgtcggcttagtacagcgtttagatgataaggaagaaacggtccgtcaccgcctgaaagtctaccgtgagaagacccagccggtcattgactattatagtaagaaaggtattctcaaacgcgtagatgggtcgcaaggaatcgacaacgttgtggcagaagtcctggggattctgggttggagcgataag

SEQ ID NO: 1626 - protein, 231 aa, synthetic construct
  REGION 1..231: note = variant of adenylate kinase from Thermotoga neapolitana
MHHHHHHGGSGMGAYLVFLGPPGAGKGTQGRIISAKTGIPHISTGDILRDIVAKQNDEVASSIKEIMEKGELVPDELGNAVVKRRLSEKDCEKGFILDGFPRTVRQAEYLDSFLESQNRQLTAAVLIEVPEDEVVQRLLSRLICPKCGRIYNMIALPPKEDELCDDCGVGLVQRLDDKEETVRHRLKVYREKTQPVIDYYSKKGILKRVDGSQGIDNVVAEVLGILGWSDK

SEQ ID NO: 1627 - DNA, 693 bp, synthetic construct
  misc_feature 1..693: note = variant of adenylate kinase from Thermotoga neapolitana
  source 1..693: mol_type = other DNA
atgcaccatcatcaccatcacgggggctccggcatgggggcatatctggtgttcttaggtccgccgggcgcgggaaaaggtacccaaggccgtattatttcggcaaagactggcatcccgcatattagcacgggcgatatcctgcgtgacatcgtcgctaagcaaaacgatgaagttgcctcgagcattaaagagatcatggagaaaggtgaactcgttccagatgaactgggtaatgcggtagtaaaacgccgcctgtcggagaaagactgcgaaaaaggctttattttggatggtttcccgcgtaccgtgcgccaagcggaatatctggatagttttcttgaaagccagaatcgccagttgacagccgccgtgctgattgaggtccccgaagatgaagttgtttctcgtctgctgtctcgcctgatctgtccgaaatgcgggcgtatctacaacatgatttttctgccaccaaaagaagacgagctgtgtgacgattgcggtgtcggcttagtacagcgtttagatgataaggaagaaacggtccgtcaccgcctgaaagtctaccgtgagaagacccagccggtcattgactattatagtaagaaaggtattctcaaacgcgtagatgggtcgcaaggaatcgacaacgttgtggcagaagtcctggggattctgggttggagcgataag

SEQ ID NO: 1628 - protein, 231 aa, synthetic construct
  REGION 1..231: note = variant of adenylate kinase from Thermotoga neapolitana
MHHHHHHGGSGMGAYLVFLGPPGAGKGTQGRIISAKTGIPHISTGDILRDIVAKQNDEVASSIKEIMEKGELVPDELGNAVVKRRLSEKDCEKGFILDGFPRTVRQAEYLDSFLESQNRQLTAAVLIEVPEDEVVSRLLSRLICPKCGRIYNMIFLPPKEDELCDDCGVGLVQRLDDKEETVRHRLKVYREKTQPVIDYYSKKGILKRVDGSQGIDNVVAEVLGILGWSDK

SEQ ID NO: 1629 - DNA, 693 bp, synthetic construct
  misc_feature 1..693: note = variant of adenylate kinase from Thermotoga neapolitana
  source 1..693: mol_type = other DNA
atgcaccatcatcaccatcacgggggctccggcatgggggcatatctggtgttcttaggtccgccgggcgcgggaaaaggtacccaaggccgtattatttcggcaaagactggcatcccgcatattagcacgggcgatatcctgcgtgacatcgtcgctaagcaaaacgatgaagttgcctcgagcattaaagagatcatggagaaaggtgaactcgttccagatgaactgggtaatgcggtagtaaaacgccgcctgtcggagaaagactgcgaaaaaggctttattttggatggtttcccgcgtaccgtgcgccaagcggaatatctggatagttttcttgaaagccagaatcgccagttgacagccgccgtgctgattgaggtccccgaagatgaagttgttcagcgtctgctgtctcgcctgatctgtccgaaatgcgggcgtttgtacaacatgatttttctgccaccaaaagaagacgagctgtgtgacgattgcggtgtcggcttagtacagcgtttagatgataaggaagaaacggtccgtcaccgcctgaaagtctaccgtgagaagacccagccggtcattgactattatagtaagaaaggtattctcaaacgcgtagatgggtcgcaaggaatcgacaacgttgtggcagaagtcctggggattctgggttggagcgataag

SEQ ID NO: 1630 - protein, 231 aa, synthetic construct
  REGION 1..231: note = variant of adenylate kinase from Thermotoga neapolitana
MHHHHHHGGSGMGAYLVFLGPPGAGKGTQGRIISAKTGIPHISTGDILRDIVAKQNDEVASSIKEIMEKGELVPDELGNAVVKRRLSEKDCEKGFILDGFPRTVRQAEYLDSFLESQNRQLTAAVLIEVPEDEVVQRLLSRLICPKCGRLYNMIFLPPKEDELCDDCGVGLVQRLDDKEETVRHRLKVYREKTQPVIDYYSKKGILKRVDGSQGIDNVVAEVLGILGWSDK

SEQ ID NO: 1631 - DNA, 693 bp, synthetic construct
  misc_feature 1..693: note = variant of adenylate kinase from Thermotoga neapolitana
  source 1..693: mol_type = other DNA
atgcaccatcatcaccatcacgggggctccggcatgggggcatatctggtgttcttaggtccgccgggcgcgggaaaaggtacccaaggccgtattatttcggcaaagactggcatcccgcatattagcacgggcgatatcctgcgtgacatcgtcgctaagcaaaacgatgaagttgcctcgagcattaaagagatcatggagaaaggtgaactcgttccagatgaactgggtaatgcggtagtaaaacgccgcctgtcggagaaagactgcgaaaaaggctttattttggatggtttcccgcgtaccgtgcgccaagcggaatatctggatagttttcttgaaagccagaatcgccagttgacagccgccgtgctgattgaggtccccgaagatgaagttgttcagcgtctgctgtctcgcctgatctgtccgaaatgcgggcgtgtttacaacatgatttttctgccaccaaaagaagacgagctgtgtgacgattgcggtgtcggcttagtacagcgtttagatgataaggaagaaacggtccgtcaccgcctgaaagtctaccgtgagaagacccagccggtcattgactattatagtaagaaaggtattctcaaacgcgtagatgggtcgcaaggaatcgacaacgttgtggcagaagtcctggggattctgggttggagcgataag

SEQ ID NO: 1632 - protein, 231 aa, synthetic construct
  REGION 1..231: note = variant of adenylate kinase from Thermotoga neapolitana
MHHHHHHGGSGMGAYLVFLGPPGAGKGTQGRIISAKTGIPHISTGDILRDIVAKQNDEVASSIKEIMEKGELVPDELGNAVVKRRLSEKDCEKGFILDGFPRTVRQAEYLDSFLESQNRQLTAAVLIEVPEDEVVQRLLSRLICPKCGRVYNMIFLPPKEDELCDDCGVGLVQRLDDKEETVRHRLKVYREKTQPVIDYYSKKGILKRVDGSQGIDNVVAEVLGILGWSDK

SEQ ID NO: 1633 - DNA, 693 bp, synthetic construct
  misc_feature 1..693: note = variant of adenylate kinase from Thermotoga neapolitana
  source 1..693: mol_type = other DNA
atgcaccatcatcaccatcacgggggctccggcatgggggcatatctggtgttcttaggtccgccgggcgcgggaaaaggtacccaaggccgtattatttcggcaaagactggcatcccgcatattagcacgggcgatatcctgcgtgacatcgtcgctaagcaaaacgatgaagttgcctcgagcattaaagagatcatggagaaaggtgaactcgttccagatgaactgggtaatgcggtagtaaaacgccgcctgtcggagaaagactgcgaaaaaggctttattttggatggtttcccgcgtaccgtgcgccaagcggaatatctggatagttttcttgaaagccagaatcgccagttgacagccgccgtgctgattgaggtccccgaagatgaagttgttcagcgtctgctgtctcgcctgatctgtccgaaatgcgggcgtatctacaacatgatttttctgccaccaaaagaagacgagctgtgtgacgattgcggtgtcggcttagtacagcgtttagatgataaggaagaaacggtccgtcaccgcctgaaagtctaccgtgagaagacccagccggtcattgactattatagtaagaaaggtattctcaaacgcgtagatgggtcgcaaggaatcgacaacgttgtggcagaagtcctggggattctgccttggagcgataag

SEQ ID NO: 1634 - protein, 231 aa, synthetic construct
  REGION 1..231: note = variant of adenylate kinase from Thermotoga neapolitana
MHHHHHHGGSGMGAYLVFLGPPGAGKGTQGRIISAKTGIPHISTGDILRDIVAKQNDEVASSIKEIMEKGELVPDELGNAVVKRRLSEKDCEKGFILDGFPRTVRQAEYLDSFLESQNRQLTAAVLIEVPEDEVVQRLLSRLICPKCGRIYNMIFLPPKEDELCDDCGVGLVQRLDDKEETVRHRLKVYREKTQPVIDYYSKKGILKRVDGSQGIDNVVAEVLGILPWSDK

SEQ ID NO: 1635 - DNA, 693 bp, synthetic construct
  misc_feature 1..693: note = variant of adenylate kinase from Thermotoga neapolitana
  source 1..693: mol_type = other DNA
atgcaccatcatcaccatcacgggggctccggcatgggggcatatctggtgttcttaggtccgccgggcgcgggaaaaggtacccaaggccgtattatttcggcaaagactggcatcccgcatattagcacgggcgatatcctgcgtgacatcgtcgctaagcaaaacgatgaagttgcctcgagcattaaagagatcatggagaaaggtgaactcgttccagatgaactgggtaatgcggtagtaaaacgccgcctgtcggagaaagactgcgaaaaaggctttattttggatggtttcccgcgtaccgtgcgccaagcggaatatctggatagttttcttgaaagccagaatcgccagttgacagccgccgtgctgattgagttgcccgaagatgaagttgttcagcgtctgctgtctcgcctgatctgtccgaaatgcgggcgtatctacaacatgatttttctgccaccaaaagaagacgagctgtgtgacgattgcggtgtcggcttagtacagcgtttagatgataaggaagaaacggtccgtcaccgcctgaaagtctaccgtgagaagacccagccggtcattgactattatagtaagaaaggtattctcaaacgcgtagatgggtcgcaaggaatcgacaacgttgtggcagaagtcctggggattctgggttggagcgataag

SEQ ID NO: 1636 - protein, 231 aa, synthetic construct
  REGION 1..231: note = variant of adenylate kinase from Thermotoga neapolitana
MHHHHHHGGSGMGAYLVFLGPPGAGKGTQGRIISAKTGIPHISTGDILRDIVAKQNDEVASSIKEIMEKGELVPDELGNAVVKRRLSEKDCEKGFILDGFPRTVRQAEYLDSFLESQNRQLTAAVLIELPEDEVVQRLLSRLICPKCGRIYNMIFLPPKEDELCDDCGVGLVQRLDDKEETVRHRLKVYREKTQPVIDYYSKKGILKRVDGSQGIDNVVAEVLGILGWSDK

SEQ ID NO: 1637 - DNA, 693 bp, synthetic construct
  misc_feature 1..693: note = variant of adenylate kinase from Thermotoga neapolitana
  source 1..693: mol_type = other DNA
atgcaccatcatcaccatcacgggggctccggcatgggggcatatctggtgttcttaggtccgccgggcgcgggaaaaggtacccaaggccgtattatttcggcaaagactggcatcccgcatattagcacgggcgatatcctgcgtgacatcgtcgctaagcaaaacgatgaagttgcctcgagcattaaagagatcatggagaaaggtgaactcgttccagatgaactgggtaatgcggtagtaaaacgccgcctgtcggagaaagactgcgaaaaaggctttattttggatggtttcccgcgtaccgtgcgccaagcggaatatctggatagttttcttgaaagccagaatcgccagttgacagccgccgtgctgattgaggtccccgaagatgaagttgttcagcgtctgctgtctcgcctgatctgtccgaaatgcgggcgtatctacaacatgatttttctgccaccaaaagaagacgagctgtgtgacgattgcggtgtcggcttagtacagcgtttagatgataaggaagaaacggtccgtcaccgcctgaaagtctaccgtgagaagacccagccggtcattgactattatagtaagaaaggtattctcaaacgcgtagatgggtcgcaaggaatcgacaacgttgtggcagaagtcctggggattctgggttggagccagaag

SEQ ID NO: 1638 - protein, 231 aa, synthetic construct
  REGION 1..231: note = variant of adenylate kinase from Thermotoga neapolitana
MHHHHHHGGSGMGAYLVFLGPPGAGKGTQGRIISAKTGIPHISTGDILRDIVAKQNDEVASSIKEIMEKGELVPDELGNAVVKRRLSEKDCEKGFILDGFPRTVRQAEYLDSFLESQNRQLTAAVLIEVPEDEVVQRLLSRLICPKCGRIYNMIFLPPKEDELCDDCGVGLVQRLDDKEETVRHRLKVYREKTQPVIDYYSKKGILKRVDGSQGIDNVVAEVLGILGWSQK

SEQ ID NO: 1639 - DNA, 693 bp, synthetic construct
  misc_feature 1..693: note = variant of adenylate kinase from Thermotoga neapolitana
  source 1..693: mol_type = other DNA
atgcaccatcatcaccatcacgggggctccggcatgggggcatatctggtgttcttaggtccgccgggcgcgggaaaaggtacccaaggccgtattatttcggcaaagactggcatcccgcatattagcacgggcgatatcctgcgtgacatcgtcgctaagcaaaacgatgaagttgcctcgagcattaaagagatcatggagaaaggtgaactcgttccagatgaactgggtaatgcggtagtaaaacgccgcctgtcggagaaagactgcgaaaaaggctttattttggatggtttcccgcgtaccgtgcgccaagcggaatatctggatagttttcttgaaagccagaatcgccagttgacagccgccgtgctgattgaggtccccgaagatgaagttgttcagcgtctgctgtctcgcctgatctgtccgaaatgcgggcgtatctacaacatgatttttctgccaccaaaagaagacgagctgtgtgacgattgcggtgtcggcttagtacagcgtttagatgataaggaagaaacggtccgtcaccgcctgaaagtctaccgtgagaagacccagccggtcattgactattatagtaagaaaggtattctcaaacgcgtagttgggtcgcaaggaatcgacaacgttgtggcagaagtcctggggattctgggttggagcgataag

SEQ ID NO: 1640 - protein, 231 aa, synthetic construct
  REGION 1..231: note = variant of adenylate kinase from Thermotoga neapolitana
MHHHHHHGGSGMGAYLVFLGPPGAGKGTQGRIISAKTGIPHISTGDILRDIVAKQNDEVASSIKEIMEKGELVPDELGNAVVKRRLSEKDCEKGFILDGFPRTVRQAEYLDSFLESQNRQLTAAVLIEVPEDEVVQRLLSRLICPKCGRIYNMIFLPPKEDELCDDCGVGLVQRLDDKEETVRHRLKVYREKTQPVIDYYSKKGILKRVVGSQGIDNVVAEVLGILGWSDK

SEQ ID NO: 1641 - DNA, 693 bp, synthetic construct
  misc_feature 1..693: note = variant of adenylate kinase from Thermotoga neapolitana
  source 1..693: mol_type = other DNA
atgcaccatcatcaccatcacgggggctccggcatgggggcatatctggtgttcttaggtccgccgggcgcgggaaaaggtacccaaggccgtattatttcggcaaagactggcatcccgcatattagcacgggcgatatcctgcgtgacatcgtcgctaagcaaaacgatgaagttgcctcgagcattaaagagatcatggagaaaggtgaactcgttccagatgaactgggtaatgcggtagtaaaacgccgcctgtcggagaaagactgcgaaaaaggctttattttggatggtttcccgcgtaccgtgcgccaagcggaatatctggatagttttcttgaaagccagaatcgccagttgacagccgccgtgctgattgaggtccccgaagatgaagttgttcagcgtctgctgtctcgcctgatctgtccgaaatgcgggcgtatctacaacatgatttttctgccaccaaaagaagacgagctgtgtgacgattgcggtgtcggcttagtacagcgtttagatgataaggaagaaacggtccgtcaccgcctgaaagtctaccgtgagaagacccagccggtcattgactattatagtaagaaaggtcttctcaaacgcgtagatgggtcgcaaggaatcgacaacgttgtggcagaagtcctggggattctgggttggagcgataag

SEQ ID NO: 1642 - protein, 231 aa, synthetic construct
  REGION 1..231: note = variant of adenylate kinase from Thermotoga neapolitana
MHHHHHHGGSGMGAYLVFLGPPGAGKGTQGRIISAKTGIPHISTGDILRDIVAKQNDEVASSIKEIMEKGELVPDELGNAVVKRRLSEKDCEKGFILDGFPRTVRQAEYLDSFLESQNRQLTAAVLIEVPEDEVVQRLLSRLICPKCGRIYNMIFLPPKEDELCDDCGVGLVQRLDDKEETVRHRLKVYREKTQPVIDYYSKKGLLKRVDGSQGIDNVVAEVLGILGWSDK

SEQ ID NO: 1643 - DNA, 693 bp, synthetic construct
  misc_feature 1..693: note = variant of adenylate kinase from Thermotoga neapolitana
  source 1..693: mol_type = other DNA
atgcaccatcatcaccatcacgggggctccggcatgggggcatatctggtgttcttaggtccgccgggcgcgggaaaaggtacccaaggccgtattatttcggcaaagactggcatcccgcatattagcacgggcgatatcctgcgtgacatcgtcgctaagcaaaacgatgaagttgcctcgagcattaaagagatcatggggaaaggtgaactcgttccagatgaactgggtaatgcggtagtaaaacgccgcctgtcggagaaagactgcgaaaaaggctttattttggatggtttcccgcgtaccgtgcgccaagcggaatatctggatagttttcttgaaagccagaatcgccagttgacagccgccgtgctgattgaggtccccgaagatgaagttgttcagcgtctgctgtctcgcctgatctgtccgaaatgcgggcgtatctacaacatgatttttctgccaccaaaagaagacgagctgtgtgacgattgcggtgtcggcttagtacagcgtttagatgataaggaagaaacggtccgtcaccgcctgaaagtctaccgtgagaagacccagccggtcattgactattatagtaagaaaggtattctcaaacgcgtagatgggtcgcaaggaatcgacaacgttgtggcagaagtcctggggattctgggttggagcgataag

SEQ ID NO: 1644 - protein, 231 aa, synthetic construct
  REGION 1..231: note = variant of adenylate kinase from Thermotoga neapolitana
MHHHHHHGGSGMGAYLVFLGPPGAGKGTQGRIISAKTGIPHISTGDILRDIVAKQNDEVASSIKEIMGKGELVPDELGNAVVKRRLSEKDCEKGFILDGFPRTVRQAEYLDSFLESQNRQLTAAVLIEVPEDEVVQRLLSRLICPKCGRIYNMIFLPPKEDELCDDCGVGLVQRLDDKEETVRHRLKVYREKTQPVIDYYSKKGILKRVDGSQGIDNVVAEVLGILGWSDK

SEQ ID NO: 1645 - DNA, 693 bp, synthetic construct
  misc_feature 1..693: note = variant of adenylate kinase from Thermotoga neapolitana
  source 1..693: mol_type = other DNA
atgcaccatcatcaccatcacgggggctccggcatgggggcatatctggtgttcttaggtccgccgggcgcgggaaaaggtacccaaggccgtattatttcggcaaagactggcatcccgcatattagcacgggcgatatcctgcgtgacatcgtcgctaagcaaaacgatgaagttgcctcgagcattaaagagatcatggagaaaggtgaactcgttccagatgaactgggtaatgcggtagtaaaacgccgcctgtcggagaaagactgcgaaaaaggctttattttggatggtttcccgcgtaccgtgcgccaagcggaatatctggatagttttcttgaaagccagaatcgccagttgacagccgccgtgctgattgaggtccccgaagattgggttgttcagcgtctgctgtctcgcctgatctgtccgaaatgcgggcgtatctacaacatgatttttctgccaccaaaagaagacgagctgtgtgacgattgcggtgtcggcttagtacagcgtttagatgataaggaagaaacggtccgtcaccgcctgaaagtctaccgtgagaagacccagccggtcattgactattatagtaagaaaggtattctcaaacgcgtagatgggtcgcaaggaatcgacaacgttgtggcagaagtcctggggattctgggttggagcgataag

SEQ ID NO: 1646 - protein, 231 aa, synthetic construct
  REGION 1..231: note = variant of adenylate kinase from Thermotoga neapolitana
MHHHHHHGGSGMGAYLVFLGPPGAGKGTQGRIISAKTGIPHISTGDILRDIVAKQNDEVASSIKEIMEKGELVPDELGNAVVKRRLSEKDCEKGFILDGFPRTVRQAEYLDSFLESQNRQLTAAVLIEVPEDWVVQRLLSRLICPKCGRIYNMIFLPPKEDELCDDCGVGLVQRLDDKEETVRHRLKVYREKTQPVIDYYSKKGILKRVDGSQGIDNVVAEVLGILGWSDK

SEQ ID NO: 1647 - DNA, 693 bp, synthetic construct
  misc_feature 1..693: note = variant of adenylate kinase from Thermotoga neapolitana
  source 1..693: mol_type = other DNA
atgcaccatcatcaccatcacgggggctccggcatgggggcatatctggtgttcttaggtccgccgggcgcgggaaaaggtacccaaggccgtattatttcggcaaagactggcatcccgcatattagcacgggcgatatcctgcgtgacatcgtcgctaagcaaaacgatgaagttgcctcgagcattaaagagatcatggagaaaggtgaactcgttccagatgaactgggtaatgcggtagtaaaacgccgcctgtcggagaaagactgcgaaaaaggctttattttggatggtttcccgcgtaccgtgcgccaagcggaatatctggatagttttcttgaaagccagaatcgccagttgacagccgccgtgctgattgaggtccccgaagatgaagttgttcagcgtctgctgtctcgcctgatctgtccgaaatgcgggcgtatctacaacatgatttggctgccaccaaaagaagacgagctgtgtgacgattgcggtgtcggcttagtacagcgtttagatgataaggaagaaacggtccgtcaccgcctgaaagtctaccgtgagaagacccagccggtcattgactattatagtaagaaaggtattctcaaacgcgtagatgggtcgcaaggaatcgacaacgttgtggcagaagtcctggggattctgggttggagcgataag

SEQ ID NO: 1648 - protein, 231 aa, synthetic construct
  REGION 1..231: note = variant of adenylate kinase from Thermotoga neapolitana
MHHHHHHGGSGMGAYLVFLGPPGAGKGTQGRIISAKTGIPHISTGDILRDIVAKQNDEVASSIKEIMEKGELVPDELGNAVVKRRLSEKDCEKGFILDGFPRTVRQAEYLDSFLESQNRQLTAAVLIEVPEDEVVQRLLSRLICPKCGRIYNMIWLPPKEDELCDDCGVGLVQRLDDKEETVRHRLKVYREKTQPVIDYYSKKGILKRVDGSQGIDNVVAEVLGILGWSDK

SEQ ID NO: 1649 - DNA, 693 bp, synthetic construct
  misc_feature 1..693: note = variant of adenylate kinase from Thermotoga neapolitana
  source 1..693: mol_type = other DNA
atgcaccatcatcaccatcacgggggctccggcatgggggcatatctggtgttcttaggtccgccgggcgcgggaaaaggtacccaaggccgtattatttcggcaaagactggcatcccgcatattagcacgggcgatatcctgcgtgacatcgtcgctaagcaaaacgatgaagttgcctcgagcattaaagagatcatggagaaaggtgaactcgttccagatgaactgggtaatgcggtagtaaaacgccgcctgtcggagaaagactgcgaaaaaggctttattttggatggtttcccgcgtaccgtgcgccaagcggaatatctggatagttttcttgaaagccagaatcgccagttgacagccgccgtgctgattgaggtccccgaagatgaagttgttcagcgtctgctgtctcgcctgatctgtccgaaatgcgggcgtatctacaacatgatttttctgccaccaaaagaagacgagctgtgtgacgattgcggtgtcggcttagtacagcgtttagatgataaggaagaaacggtccgtcaccgcctgaaagtctaccgtgagaagacccagccggtcattgactattatagtaagaaaggtattctcaaacgcgtagatgggcggcaaggaatcgacaacgttgtggcagaagtcctggggattctgggttggagcgataag

SEQ ID NO: 1650 - protein, 231 aa, synthetic construct
  REGION 1..231: note = variant of adenylate kinase from Thermotoga neapolitana
MHHHHHHGGSGMGAYLVFLGPPGAGKGTQGRIISAKTGIPHISTGDILRDIVAKQNDEVASSIKEIMEKGELVPDELGNAVVKRRLSEKDCEKGFILDGFPRTVRQAEYLDSFLESQNRQLTAAVLIEVPEDEVVQRLLSRLICPKCGRIYNMIFLPPKEDELCDDCGVGLVQRLDDKEETVRHRLKVYREKTQPVIDYYSKKGILKRVDGRQGIDNVVAEVLGILGWSDK

SEQ ID NO: 1651 - DNA, 693 bp, synthetic construct
  misc_feature 1..693: note = variant of adenylate kinase from Thermotoga neapolitana
  source 1..693: mol_type = other DNA
atgcaccatcatcaccatcacgggggctccggcatgggggcatatctggtgttcttaggtccgccgggcgcgggaaaaggtacccaaggccgtattatttcggcaaagactggcatcccgcatattagcacgggcgatatcctgcgtgacatcgtcgctaagcaaaacgatgaagttgcctcgagcattaaagagatcatggagaaaggtgaactcgttccagatgaactgggtaatgcggtagtaaaacgccgcctgtcggagaaagactgcgaaaaaggctttattttggatggtttcccgcgtaccgtgcgccaagcggaatatctggatagttttcttgaaagccagaatcgccagttgacagccgccgtgctgattgaggtccccgaagatgaagttgttcagcgtctgctgtctcgcctgatctgtccgaaatgcgggcgtatctacaacatgatttttctgccaccaaaagaagacgagctgtgtgacgattgcggtgtcggcttagtacagcgtttagatgataaggaagaaacggtccgtcaccgcctgaaagtctaccgtgagaagacccagccggtcattgactattatagtaagaaaggtattctcgcgcgcgtagatgggtcgcaaggaatcgacaacgttgtggcagaagtcctggggattctgggttggagcgataag

SEQ ID NO: 1652 - protein, 231 aa, synthetic construct
  REGION 1..231: note = variant of adenylate kinase from Thermotoga neapolitana
MHHHHHHGGSGMGAYLVFLGPPGAGKGTQGRIISAKTGIPHISTGDILRDIVAKQNDEVASSIKEIMEKGELVPDELGNAVVKRRLSEKDCEKGFILDGFPRTVRQAEYLDSFLESQNRQLTAAVLIEVPEDEVVQRLLSRLICPKCGRIYNMIFLPPKEDELCDDCGVGLVQRLDDKEETVRHRLKVYREKTQPVIDYYSKKGILARVDGSQGIDNVVAEVLGILGWSDK

SEQ ID NO: 1653 - DNA, 693 bp, synthetic construct
  misc_feature 1..693: note = variant of adenylate kinase from Thermotoga neapolitana
  source 1..693: mol_type = other DNA
atgcaccatcatcaccatcacgggggctccggcatgggggcatatctggtgttcttaggtccgccgggcgcgggaaaaggtacccaaggccgtattatttcggcaaagactggcatcccgcatattagcacgggcgatatcctgcgtgacatcgtcgctaagcaaaacgatgaagttgcctcgagcattaaagagatcatggagaaaggtgaactcgttccagatgaactgggtaatgcggtagtaaaacgccgcctgtcggagaaagactgcgaaaaaggctttattttggatggtttcccgcgtaccgtgcgccaagcggaatatctggatagttttcttgaaagccagaatcgccagttgacagccgccgtgctgattgaggtccccgaagatgaagttgttcagcgtctgctgtctcgcctgatctgtccgaaatgcgggcgtatctttaacatgatttttctgccaccaaaagaagacgagctgtgtgacgattgcggtgtcggcttagtacagcgtttagatgataaggaagaaacggtccgtcaccgcctgaaagtctaccgtgagaagacccagccggtcattgactattatagtaagaaaggtattctcaaacgcgtagatgggtcgcaaggaatcgacaacgttgtggcagaagtcctggggattctgggttggagcgataag

SEQ ID NO: 1654 - protein, 231 aa, synthetic construct
  REGION 1..231: note = variant of adenylate kinase from Thermotoga neapolitana
MHHHHHHGGSGMGAYLVFLGPPGAGKGTQGRIISAKTGIPHISTGDILRDIVAKQNDEVASSIKEIMEKGELVPDELGNAVVKRRLSEKDCEKGFILDGFPRTVRQAEYLDSFLESQNRQLTAAVLIEVPEDEVVQRLLSRLICPKCGRIFNMIFLPPKEDELCDDCGVGLVQRLDDKEETVRHRLKVYREKTQPVIDYYSKKGILKRVDGSQGIDNVVAEVLGILGWSDK

SEQ ID NO: 1655 - DNA, 693 bp, synthetic construct
  misc_feature 1..693: note = variant of adenylate kinase from Thermotoga neapolitana
  source 1..693: mol_type = other DNA
atgcaccatcatcaccatcacgggggctccggcatgggggcatatctggtgttcttaggtccgccgggcgcgggaaaaggtacccaaggccgtattatttcggcaaagactggcatcccgcatattagcacgggcgatatcctgcgtgacatcgtcgctaagcaaaacgatgaagttgcctcgagcattaaagagatcatggagaaaggtgaactcgttccagatgaactgggtaatgcggtagtaaaacgccgcctgtcggagaaagactgcgaaaaaggctttattttggatggtttcccgcgtaccgtgcgccaagcggaatatctggatagttttcttgaaagccagaatcgccagttgacagccgccgtgctgattgaggtccccgaagatgaagttgttcagcgtctgctgtctcgcctgatctgtccgaaatgcgggcgtatctacaacatgatttttctgccaccaaaagaagacgagctgtgtgacgattgcggtgtcggcttagtacagcgtttagatgataaggaagaaacggtccgtcaccgcctgaaagtctaccgtgagaagacccagccggtcattgactattatagtaagaaaggtattctcaaacgcgtagatgggcctcaaggaatcgacaacgttgtggcagaagtcctggggattctgggttggagcgataag

SEQ ID NO: 1656 - protein, 231 aa, synthetic construct
  REGION 1..231: note = variant of adenylate kinase from Thermotoga neapolitana
MHHHHHHGGSGMGAYLVFLGPPGAGKGTQGRIISAKTGIPHISTGDILRDIVAKQNDEVASSIKEIMEKGELVPDELGNAVVKRRLSEKDCEKGFILDGFPRTVRQAEYLDSFLESQNRQLTAAVLIEVPEDEVVQRLLSRLICPKCGRIYNMIFLPPKEDELCDDCGVGLVQRLDDKEETVRHRLKVYREKTQPVIDYYSKKGILKRVDGPQGIDNVVAEVLGILGWSDK

SEQ ID NO: 1657 - DNA, 693 bp, synthetic construct
  misc_feature 1..693: note = variant of adenylate kinase from Thermotoga neapolitana
  source 1..693: mol_type = other DNA
atgcaccatcatcaccatcacgggggctccggcatgggggcatatctggtgttcttaggtccgccgggcgcgggaaaaggtacccaaggccgtattatttcggcaaagactggcatcccgcatattagcacgggcgatatcctgcgtgacatcgtcgctaagcaaaacgatgaagttgcctcgagcattaaagagatcatggagaaaggtgaactcgttccagatgaactgggtaatgcggtagtaaaacgccgcctgtcggagaaagactgcgaaaaaggctttattttggatggtttcccgcgtaccgtgcgccaagcggaatatctggatagttttcttgaaagccagaatcgccagttgacagccgccgtgctgattgaggtccccgaagatgaagttgttcagcgtctgctgtctcgcctgatctgtccgaaatgcgggcgtatctacaacatgatttttctgccaccaaaagaagacgagctgtgtgacgattgcggtgtcggcttagtacagcgtttagatgataaggaagaaacggtccgtcaccgcctgaaagtctaccgtgagaagacccagccggtcattgactattatagtaagaaaggtattctcaaacgcgtagatgggtcgcaaggaatcgacaacattgtggcagaagtcctggggattctgggttggagcgataag

SEQ ID NO: 1658 - protein, 231 aa, synthetic construct
  REGION 1..231: note = variant of adenylate kinase from Thermotoga neapolitana
MHHHHHHGGSGMGAYLVFLGPPGAGKGTQGRIISAKTGIPHISTGDILRDIVAKQNDEVASSIKEIMEKGELVPDELGNAVVKRRLSEKDCEKGFILDGFPRTVRQAEYLDSFLESQNRQLTAAVLIEVPEDEVVQRLLSRLICPKCGRIYNMIFLPPKEDELCDDCGVGLVQRLDDKEETVRHRLKVYREKTQPVIDYYSKKGILKRVDGSQGIDNIVAEVLGILGWSDK

SEQ ID NO: 1659 - DNA, 693 bp, synthetic construct
  misc_feature 1..693: note = variant of adenylate kinase from Thermotoga neapolitana
  source 1..693: mol_type = other DNA
atgcaccatcatcaccatcacgggggctccggcatgggggcatatctggtgttcttaggtccgccgggcgcgggaaaaggtacccaaggccgtattatttcggcaaagactggcatcccgcatattagcacgggcgatatcctgcgtgacatcgtcgctaagcaaaacgatgaagttgcctcgagcattaaagagatcatggagaaaggtgaactcgttccagatgaactgggtaatgcggtagtaaaacgccgcctgtcggagaaagactgcgaaaaaggctttattttggatggtttcccgcgtaccgtgcgccaagcggaatatctggatagttttcttgaaagccagaatcgccagttgacagccgccgtgctgattgagccgcccgaagatgaagttgttcagcgtctgctgtctcgcctgatctgtccgaaatgcgggcgtatctacaacatgatttttctgccaccaaaagaagacgagctgtgtgacgattgcggtgtcggcttagtacagcgtttagatgataaggaagaaacggtccgtcaccgcctgaaagtctaccgtgagaagacccagccggtcattgactattatagtaagaaaggtattctcaaacgcgtagatgggtcgcaaggaatcgacaacgttgtggcagaagtcctggggattctgggttggagcgataag

SEQ ID NO: 1660 - protein, 231 aa, synthetic construct
  REGION 1..231: note = variant of adenylate kinase from Thermotoga neapolitana
MHHHHHHGGSGMGAYLVFLGPPGAGKGTQGRIISAKTGIPHISTGDILRDIVAKQNDEVASSIKEIMEKGELVPDELGNAVVKRRLSEKDCEKGFILDGFPRTVRQAEYLDSFLESQNRQLTAAVLIEPPEDEVVQRLLSRLICPKCGRIYNMIFLPPKEDELCDDCGVGLVQRLDDKEETVRHRLKVYREKTQPVIDYYSKKGILKRVDGSQGIDNVVAEVLGILGWSDK

SEQ ID NO: 1661 - DNA, 693 bp, synthetic construct
  misc_feature 1..693: note = variant of adenylate kinase from Thermotoga neapolitana
  source 1..693: mol_type = other DNA
atgcaccatcatcaccatcacgggggctccggcatgggggcatatctggtgttcttaggtccgccgggcgcgggaaaaggtacccaaggccgtattatttcggcaaagactggcatcccgcatattgctacgggcgatatcctgcgtgacatcgtcgctaagcaaaacgatgaagttgcctcgagcattaaagagatcatggagaaaggtgaactcgttccagatgaactgggtaatgcggtagtaaaacgccgcctgtcggagaaagactgcgaaaaaggctttattttggatggtttcccgcgtaccgtgcgccaagcggaatatctggatagttttcttgaaagccagaatcgccagttgacagccgccgtgctgattgaggtccccgaagatgaagttgttcagcgtctgctgtctcgcctgatctgtccgaaatgcgggcgtatctacaacatgatttttctgccaccaaaagaagacgagctgtgtgacgattgcggtgtcggcttagtacagcgtttagatgataaggaagaaacggtccgtcaccgcctgaaagtctaccgtgagaagacccagccggtcattgactattatagtaagaaaggtattctcaaacgcgtagatgggtcgcaaggaatcgacaacgttgtggcagaagtcctggggattctgggttggagcgataag

SEQ ID NO: 1662 - protein, 231 aa, synthetic construct
  REGION 1..231: note = variant of adenylate kinase from Thermotoga neapolitana
MHHHHHHGGSGMGAYLVFLGPPGAGKGTQGRIISAKTGIPHIATGDILRDIVAKQNDEVASSIKEIMEKGELVPDELGNAVVKRRLSEKDCEKGFILDGFPRTVRQAEYLDSFLESQNRQLTAAVLIEVPEDEVVQRLLSRLICPKCGRIYNMIFLPPKEDELCDDCGVGLVQRLDDKEETVRHRLKVYREKTQPVIDYYSKKGILKRVDGSQGIDNVVAEVLGILGWSDK

SEQ ID NO: 1663 - DNA, 693 bp, synthetic construct
  misc_feature 1..693: note = variant of adenylate kinase from Thermotoga neapolitana
  source 1..693: mol_type = other DNA
atgcaccatcatcaccatcacgggggctccggcatgggggcatatctggtgttcttaggtccgccgggcgcgggaaaaggtacccaaggccgtattatttcggcaaagactggcatcccgcatattagcacgggcgatatcctgcgtgacatcgtcgctaagcaaaacgatgaagttgcctcgagcattaaagagatcatggagaaaggtgaactcgttccagatgaactgggtaatgcggtagtaaaacgccgcctgtcggagaaagactgcgaaaaaggctttattttggatggtttcccgcgtaccgtgcgccaagcggaatatctggatagttttcttgaaagccagaatcgccagttgacagccgccgtgctgattgaggtccccgaagatgaagttgttcagcgtctgctgtctcgcctgatctgtccgaaatgcgggcgtatctacaacatgatttttctgccaccaaaagaagacgagctgtgtgacgattgcggtgtcggcttagtacagcgtttagatgataaggaagaaacggtccgtcaccgcctgaaagtctaccgtgagaagacccagccggtcattgactattatagtaagaaaggtattctcaaacgcgtagatgggtcgcaaggaatcgacaacgttgtggcagaagtcctggggattctgggttggagcccgaag

SEQ ID NO: 1664 - protein, 231 aa, synthetic construct
  REGION 1..231: note = variant of adenylate kinase from Thermotoga neapolitana
MHHHHHHGGSGMGAYLVFLGPPGAGKGTQGRIISAKTGIPHISTGDILRDIVAKQNDEVASSIKEIMEKGELVPDELGNAVVKRRLSEKDCEKGFILDGFPRTVRQAEYLDSFLESQNRQLTAAVLIEVPEDEVVQRLLSRLICPKCGRIYNMIFLPPKEDELCDDCGVGLVQRLDDKEETVRHRLKVYREKTQPVIDYYSKKGILKRVDGSQGIDNVVAEVLGILGWSPK

SEQ ID NO: 1665 - DNA, 693 bp, synthetic construct
  misc_feature 1..693: note = variant of adenylate kinase from Thermotoga neapolitana
  source 1..693: mol_type = other DNA
atgcaccatcatcaccatcacgggggctccggcatgggggcatatctggtgttcttaggtccgccgggcgcgggaaaaggtacccaaggccgtattatttcggcaaagactggcatcccgcatattagcacgggcgatatcctgcgtgacatcgtcgctaagcaaaacgatgaagttgcctcgagcattaaagagatcatggagaaaggtgaactcgttccagatgaactgggtaatgcggtagtaaaacgccgcctgtcggagaaagactgcgaaaaaggctttattttggatggtttcccgcgtaccgtgcgccaagcggaatatctggatagttttcttgaaagccagaatcgccagttgacagccgccgtgctgattgagtcgcccgaagatgaagttgttcagcgtctgctgtctcgcctgatctgtccgaaatgcgggcgtatctacaacatgatttttctgccaccaaaagaagacgagctgtgtgacgattgcggtgtcggcttagtacagcgtttagatgataaggaagaaacggtccgtcaccgcctgaaagtctaccgtgagaagacccagccggtcattgactattatagtaagaaaggtattctcaaacgcgtagatgggtcgcaaggaatcgacaacgttgtggcagaagtcctggggattctgggttggagcgataag

SEQ ID NO: 1666 - protein, 231 aa, synthetic construct
  REGION 1..231: note = variant of adenylate kinase from Thermotoga neapolitana
MHHHHHHGGSGMGAYLVFLGPPGAGKGTQGRIISAKTGIPHISTGDILRDIVAKQNDEVASSIKEIMEKGELVPDELGNAVVKRRLSEKDCEKGFILDGFPRTVRQAEYLDSFLESQNRQLTAAVLIESPEDEVVQRLLSRLICPKCGRIYNMIFLPPKEDELCDDCGVGLVQRLDDKEETVRHRLKVYREKTQPVIDYYSKKGILKRVDGSQGIDNVVAEVLGILGWSDK

SEQ ID NO: 1667 - DNA, 693 bp, synthetic construct
  misc_feature 1..693: note = variant of adenylate kinase from Thermotoga neapolitana
  source 1..693: mol_type = other DNA
atgcaccatcatcaccatcacgggggctccggcatgggggcatatctggtgttcttaggtccgccgggcgcgggaaaaggtacccaaggccgtattatttcggcaaagactggcatcccgcatattagcacgggcgatatcctgcgtgacatcgtcgctaagcaaaacgatgaagttgcctcgagcattaaagagatcatggcgaaaggtgaactcgttccagatgaactgggtaatgcggtagtaaaacgccgcctgtcggagaaagactgcgaaaaaggctttattttggatggtttcccgcgtaccgtgcgccaagcggaatatctggatagttttcttgaaagccagaatcgccagttgacagccgccgtgctgattgaggtccccgaagatgaagttgttcagcgtctgctgtctcgcctgatctgtccgaaatgcgggcgtatctacaacatgatttttctgccaccaaaagaagacgagctgtgtgacgattgcggtgtcggcttagtacagcgtttagatgataaggaagaaacggtccgtcaccgcctgaaagtctaccgtgagaagacccagccggtcattgactattatagtaagaaaggtattctcaaacgcgtagatgggtcgcaaggaatcgacaacgttgtggcagaagtcctggggattctgggttggagcgataag

SEQ ID NO: 1668 - protein, 231 aa, synthetic construct
  REGION 1..231: note = variant of adenylate kinase from Thermotoga neapolitana
MHHHHHHGGSGMGAYLVFLGPPGAGKGTQGRIISAKTGIPHISTGDILRDIVAKQNDEVASSIKEIMAKGELVPDELGNAVVKRRLSEKDCEKGFILDGFPRTVRQAEYLDSFLESQNRQLTAAVLIEVPEDEVVQRLLSRLICPKCGRIYNMIFLPPKEDELCDDCGVGLVQRLDDKEETVRHRLKVYREKTQPVIDYYSKKGILKRVDGSQGIDNVVAEVLGILGWSDK

SEQ ID NO: 1669 - DNA, 693 bp, synthetic construct
  misc_feature 1..693: note = variant of adenylate kinase from Thermotoga neapolitana
  source 1..693: mol_type = other DNA
atgcaccatcatcaccatcacgggggctccggcatgggggcatatctggtgttcttaggtccgccgggcgcgggaaaaggtacccaaggccgtattatttcggcaaagactggcatcccgcatattagcacgggcgatatcctgcgtgacatcgtcgctaagcaaaacgatgaagttgcctcgagcattaaagagatcatggagaaaggtgaactcgttccagatgaactgggtaatgcggtagtaaaacgccgcctgtcggagaaagactgcgaaaaaggctttattttggatggtttcccgcgtaccgtgcgccaagcggaatatctggatagttttcttgaaagccagaatcgccagttgacagccgccgtgctgattgaggtccccgaagatgaagttgttcagcgtctgctgtctcgctttatctgtccgaaatgcgggcgtatctacaacatgatttttctgccaccaaaagaagacgagctgtgtgacgattgcggtgtcggcttagtacagcgtttagatgataaggaagaaacggtccgtcaccgcctgaaagtctaccgtgagaagacccagccggtcattgactattatagtaagaaaggtattctcaaacgcgtagatgggtcgcaaggaatcgacaacgttgtggcagaagtcctggggattctgggttggagcgataag

SEQ ID NO: 1670 - protein, 231 aa, synthetic construct
  REGION 1..231: note = variant of adenylate kinase from Thermotoga neapolitana
MHHHHHHGGSGMGAYLVFLGPPGAGKGTQGRIISAKTGIPHISTGDILRDIVAKQNDEVASSIKEIMEKGELVPDELGNAVVKRRLSEKDCEKGFILDGFPRTVRQAEYLDSFLESQNRQLTAAVLIEVPEDEVVQRLLSRFICPKCGRIYNMIFLPPKEDELCDDCGVGLVQRLDDKEETVRHRLKVYREKTQPVIDYYSKKGILKRVDGSQGIDNVVAEVLGILGWSDK

SEQ ID NO: 1671 - DNA, 693 bp, synthetic construct
  misc_feature 1..693: note = variant of adenylate kinase from Thermotoga neapolitana
  source 1..693: mol_type = other DNA
atgcaccatcatcaccatcacgggggctccggcatgggggcatatctggtgttcttaggtccgccgggcgcgggaaaaggtacccaaggccgtattatttcggcaaagactggcatcccgcatattagcacgggcgatatcctgcgtgacatcgtcgctaagcaaaacgatgaagttgcctcgagcattaaagagatcatggagaaaggtgaactcgttccagatgaactgggtaatgcggtagtaaaacgccgcctgtcggagaaagactgcgaaaaaggctttattttggatggtttcccgcgtaccgtgcgccaagcggaatatctggatagttttcttgaaagccagaatcgccagttgacagccgccgtgctgattgaggtccccgaagatgaagttgttcagcgtctgctgtctcgcctgatctgtccgaaatgcgggcgtatctacaacatgatttttctgccaccaaaagaagacgagctgtgtgacgattgcggtgtcggcttagtacagcgtttagatgataaggaagaaacggtccgtcaccgcctgaaagtctaccgtgagaagacccagccggtcattgactattatagtaagaaatctattctcaaacgcgtagatgggtcgcaaggaatcgacaacgttgtggcagaagtcctggggattctgggttggagcgataag

SEQ ID NO: 1672 - protein, 231 aa, synthetic construct
  REGION 1..231: note = variant of adenylate kinase from Thermotoga neapolitana
MHHHHHHGGSGMGAYLVFLGPPGAGKGTQGRIISAKTGIPHISTGDILRDIVAKQNDEVASSIKEIMEKGELVPDELGNAVVKRRLSEKDCEKGFILDGFPRTVRQAEYLDSFLESQNRQLTAAVLIEVPEDEVVQRLLSRLICPKCGRIYNMIFLPPKEDELCDDCGVGLVQRLDDKEETVRHRLKVYREKTQPVIDYYSKKSILKRVDGSQGIDNVVAEVLGILGWSDK

SEQ ID NO: 1673 - DNA, 693 bp, synthetic construct
  misc_feature 1..693: note = variant of adenylate kinase from Thermotoga neapolitana
  source 1..693: mol_type = other DNA
atgcaccatcatcaccatcacgggggctccggcatgggggcatatctggtgttcttaggtccgccgggcgcgggaaaaggtacccaaggccgtattatttcggcaaagactggcatcccgcatattagcacgggcgatatcctgcgtgacatcgtcgctaagcaaaacgatgaagttgcctcgagcattaaagagatcatggagaaaggtgaactcgttccagatgaactgggtaatgcggtagtaaaacgccgcctgtcggagaaagactgcgaaaaaggctttattttggatggtttcccgcgtaccgtgcgccaagcggaatatctggatagttttcttgaaagccagaatcgccagttgacagccgccgtgctgattgaggtccccgaagatgaagttgtttatcgtctgctgtctcgcctgatctgtccgaaatgcgggcgtatctacaacatgatttttctgccaccaaaagaagacgagctgtgtgacgattgcggtgtcggcttagtacagcgtttagatgataaggaagaaacggtccgtcaccgcctgaaagtctaccgtgagaagacccagccggtcattgactattatagtaagaaaggtattctcaaacgcgtagatgggtcgcaaggaatcgacaacgttgtggcagaagtcctggggattctgggttggagcgataag

SEQ ID NO: 1674 - protein, 231 aa, synthetic construct
  REGION 1..231: note = variant of adenylate kinase from Thermotoga neapolitana
MHHHHHHGGSGMGAYLVFLGPPGAGKGTQGRIISAKTGIPHISTGDILRDIVAKQNDEVASSIKEIMEKGELVPDELGNAVVKRRLSEKDCEKGFILDGFPRTVRQAEYLDSFLESQNRQLTAAVLIEVPEDEVVYRLLSRLICPKCGRIYNMIFLPPKEDELCDDCGVGLVQRLDDKEETVRHRLKVYREKTQPVIDYYSKKGILKRVDGSQGIDNVVAEVLGILGWSDK

SEQ ID NO: 1675 - DNA, 693 bp, synthetic construct
  misc_feature 1..693: note = variant of adenylate kinase from Thermotoga neapolitana
  source 1..693: mol_type = other DNA
atgcaccatcatcaccatcacgggggctccggcatgggggcatatctggtgttcttaggtccgccgggcgcgggaaaaggtacccaaggccgtattatttcggcaaagactggcatcccgcatattagcacgggcgatatcctgcgtgacatcgtcgctaagcaaaacgatgaagttgcctcgagcattaaagagatcatggagaaaggtgaactcgttccagatgaactgggtaatgcggtagtaaaacgccgcctgtcggagaaagactgcgaaaaaggctttattttggatggtttcccgcgtaccgtgcgccaagcggaatatctggatagttttcttgaaagccagaatcgccagttgacagccgccgtgctgattgaggtccccgaagatgaagttgttcagcgtctgctgtctcgcctgatctgtccgaaatgcgggcgtatctacaacatgatttttctgccaccaaaagaagacgagctgtgtgacgattgcggtgtcggcttagtacagcgtttagatgataaggaagaaacgtcgcgtcaccgcctgaaagtctaccgtgagaagacccagccggtcattgactattatagtaagaaaggtattctcaaacgcgtagatgggtcgcaaggaatcgacaacgttgtggcagaagtcctggggattctgggttggagcgataag

SEQ ID NO: 1676 - protein, 231 aa, synthetic construct
  REGION 1..231: note = variant of adenylate kinase from Thermotoga neapolitana
MHHHHHHGGSGMGAYLVFLGPPGAGKGTQGRIISAKTGIPHISTGDILRDIVAKQNDEVASSIKEIMEKGELVPDELGNAVVKRRLSEKDCEKGFILDGFPRTVRQAEYLDSFLESQNRQLTAAVLIEVPEDEVVQRLLSRLICPKCGRIYNMIFLPPKEDELCDDCGVGLVQRLDDKEETSRHRLKVYREKTQPVIDYYSKKGILKRVDGSQGIDNVVAEVLGILGWSDK

SEQ ID NO: 1677 - DNA, 693 bp, synthetic construct
  misc_feature 1..693: note = variant of adenylate kinase from Thermotoga neapolitana
  source 1..693: mol_type = other DNA
atgcaccatcatcaccatcacgggggctccggcatgggggcatatctggtgttcttaggtccgccgggcgcgggaaaaggtacccaaggccgtattatttcggcaaagactggcatcccgcatattagcacgggcgatatcctgcgtgacatcgtcgctaagcaaaacgatgaagttgcctcgagcattaaagagatcatggagaaaggtgaactcgttccagatgaactgggtaatgcggtagtaaaacgccgcctgtcggagaaagactgcgaaaaaggctttattttggatggtttcccgcgtaccgtgcgccaagcggaatatctggatagttttcttgaaagccagaatcgccagttgacagccgccgtgctgattgaggtccccgaagattcggttgttcagcgtctgctgtctcgcctgatctgtccgaaatgcgggcgtatctacaacatgatttttctgccaccaaaagaagacgagctgtgtgacgattgcggtgtcggcttagtacagcgtttagatgataaggaagaaacggtccgtcaccgcctgaaagtctaccgtgagaagacccagccggtcattgactattatagtaagaaaggtattctcaaacgcgtagatgggtcgcaaggaatcgacaacgttgtggcagaagtcctggggattctgggttggagcgataag

SEQ ID NO: 1678 - protein, 231 aa, synthetic construct
  REGION 1..231: note = variant of adenylate kinase from Thermotoga neapolitana
MHHHHHHGGSGMGAYLVFLGPPGAGKGTQGRIISAKTGIPHISTGDILRDIVAKQNDEVASSIKEIMEKGELVPDELGNAVVKRRLSEKDCEKGFILDGFPRTVRQAEYLDSFLESQNRQLTAAVLIEVPEDSVVQRLLSRLICPKCGRIYNMIFLPPKEDELCDDCGVGLVQRLDDKEETVRHRLKVYREKTQPVIDYYSKKGILKRVDGSQGIDNVVAEVLGILGWSDK

SEQ ID NO: 1679 - DNA, 693 bp, synthetic construct
  misc_feature 1..693: note = variant of adenylate kinase from Thermotoga neapolitana
  source 1..693: mol_type = other DNA
atgcaccatcatcaccatcacgggggctccggcatgggggcatatctggtgttcttaggtccgccgggcgcgggaaaaggtacccaaggccgtattatttcggcaaagactggcatcccgcatattagcacgggcgatatcctgcgtgacatcgtcgctaagcaaaacgatgaagttgcctcgagcattaaagagatcatggagaaaggtgaactcgttccagatgaactgggtaatgcggtagtaaaacgccgcctgtcggagaaagactgcgaaaaaggctttattttggatggtttcccgcgtaccgtgcgccaagcggaatatctggatagttttcttgaaagccagaatcgccagttgacagccgccgtgctgattgaggtccccgaagatgaagttgttcagcgtctgctgtctcgcctgatctgtccgaaatgcgggcgtatctacaacatgatttttctgccaccaaaagaagacgagctgtgtgacgattgcggtgtcggcttagtacagcgtttagatgataaggaagaaacggtccgtcaccgcctgaaagtctaccgtgagaagacccagccggtcattgactattatagtaagaaaggtattctcaaacgcgtagatgggtcgcaaggaatcgacaacgttgtggcagaagtcctggggattctgggtattagcgataag

SEQ ID NO: 1680 - protein, 231 aa, synthetic construct
  REGION 1..231: note = variant of adenylate kinase from Thermotoga neapolitana
MHHHHHHGGSGMGAYLVFLGPPGAGKGTQGRIISAKTGIPHISTGDILRDIVAKQNDEVASSIKEIMEKGELVPDELGNAVVKRRLSEKDCEKGFILDGFPRTVRQAEYLDSFLESQNRQLTAAVLIEVPEDEVVQRLLSRLICPKCGRIYNMIFLPPKEDELCDDCGVGLVQRLDDKEETVRHRLKVYREKTQPVIDYYSKKGILKRVDGSQGIDNVVAEVLGILGISDK

SEQ ID NO: 1681 - DNA, 693 bp, synthetic construct
  misc_feature 1..693: note = variant of adenylate kinase from Thermotoga neapolitana
  source 1..693: mol_type = other DNA
atgcaccatcatcaccatcacgggggctccggcatgggggcatatctggtgttcttaggtccgccgggcgcgggaaaaggtacccaaggccgtattatttcggcaaagactggcatcccgcatatttgtacgggcgatatcctgcgtgacatcgtcgctaagcaaaacgatgaagttgcctcgagcattaaagagatcatggagaaaggtgaactcgttccagatgaactgggtaatgcggtagtaaaacgccgcctgtcggagaaagactgcgaaaaaggctttattttggatggtttcccgcgtaccgtgcgccaagcggaatatctggatagttttcttgaaagccagaatcgccagttgacagccgccgtgctgattgaggtccccgaagatgaagttgttcagcgtctgctgtctcgcctgatctgtccgaaatgcgggcgtatctacaacatgatttttctgccaccaaaagaagacgagctgtgtgacgattgcggtgtcggcttagtacagcgtttagatgataaggaagaaacggtccgtcaccgcctgaaagtctaccgtgagaagacccagccggtcattgactattatagtaagaaaggtattctcaaacgcgtagatgggtcgcaaggaatcgacaacgttgtggcagaagtcctggggattctgggttggagcgataag

SEQ ID NO: 1682 - protein, 231 aa, synthetic construct
  REGION 1..231: note = variant of adenylate kinase from Thermotoga neapolitana
MHHHHHHGGSGMGAYLVFLGPPGAGKGTQGRIISAKTGIPHICTGDILRDIVAKQNDEVASSIKEIMEKGELVPDELGNAVVKRRLSEKDCEKGFILDGFPRTVRQAEYLDSFLESQNRQLTAAVLIEVPEDEVVQRLLSRLICPKCGRIYNMIFLPPKEDELCDDCGVGLVQRLDDKEETVRHRLKVYREKTQPVIDYYSKKGILKRVDGSQGIDNVVAEVLGILGWSDK

SEQ ID NO: 1683 - DNA, 693 bp, synthetic construct
  misc_feature 1..693: note = variant of adenylate kinase from Thermotoga neapolitana
  source 1..693: mol_type = other DNA
atgcaccatcatcaccatcacgggggctccggcatgggggcatatctggtgttcttaggtccgccgggcgcgggaaaaggtacccaaggccgtattatttcggcaaagactggcatcccgcatattagcacgggcgatatcctgcgtgacatcgtcgctaagcaaaacgatgaagttgcctcgagcattaaagagatcatggagaaaggtgaactcgttccagatgaactgggtaatgcggtagtaaaacgccgcctgtcggagaaagactgcgaaaaaggctttattttggatggtttcccgcgtaccgtgcgccaagcggaatatctggatagttttcttgaaagccagaatcgccagttgacagccgccgtgctgattgaggtccccgaagatgaagttgttcagcgtctgctgtctcgcctgatctgtccgaaatgcgggcgtatctacaacatgatttttctgccaccaaaagaagacgagctgtgtgacgattgcggtgtcggcttagtacagcgtttagatgataaggaagaaacggtccgtcaccgcctgaaagtctaccgtgagaagacccagccggtcattgactattatagtaagaaaggtattctcaaacgcgtagatgggtcgcaaggaatcgacggtgttgtggcagaagtcctggggattctgggttggagcgataag

SEQ ID NO: 1684 - protein, 231 aa, synthetic construct
  REGION 1..231: note = variant of adenylate kinase from Thermotoga neapolitana
MHHHHHHGGSGMGAYLVFLGPPGAGKGTQGRIISAKTGIPHISTGDILRDIVAKQNDEVASSIKEIMEKGELVPDELGNAVVKRRLSEKDCEKGFILDGFPRTVRQAEYLDSFLESQNRQLTAAVLIEVPEDEVVQRLLSRLICPKCGRIYNMIFLPPKEDELCDDCGVGLVQRLDDKEETVRHRLKVYREKTQPVIDYYSKKGILKRVDGSQGIDGVVAEVLGILGWSDK

SEQ ID NO: 1685 - DNA, 693 bp, synthetic construct
  misc_feature 1..693: note = variant of adenylate kinase from Thermotoga neapolitana
  source 1..693: mol_type = other DNA
atgcaccatcatcaccatcacgggggctccggcatgggggcatatctggtgttcttaggtccgccgggcgcgggaaaaggtacccaaggccgtattatttcggcaaagactggcatcccgcatattagcacgggcgatatcctgcgtgacatcgtcgctaagcaaaacgatgaagttgcctcgagcattaaagagatcatggagaaaggtgaactcgttccagatgaactgggtaatgcggtagtaaaacgccgcctgtcggagaaagactgcgaaaaaggctttattttggatggtttcccgcgtaccgtgcgccaagcggaatatctggatagttttcttgaaagccagaatcgccagttgacagccgccgtgctgattgagattcccgaagatgaagttgttcagcgtctgctgtctcgcctgatctgtccgaaatgcgggcgtatctacaacatgatttttctgccaccaaaagaagacgagctgtgtgacgattgcggtgtcggcttagtacagcgtttagatgataaggaagaaacggtccgtcaccgcctgaaagtctaccgtgagaagacccagccggtcattgactattatagtaagaaaggtattctcaaacgcgtagatgggtcgcaaggaatcgacaacgttgtggcagaagtcctggggattctgggttggagcgataag

SEQ ID NO: 1686 - protein, 231 aa, synthetic construct
  REGION 1..231: note = variant of adenylate kinase from Thermotoga neapolitana
MHHHHHHGGSGMGAYLVFLGPPGAGKGTQGRIISAKTGIPHISTGDILRDIVAKQNDEVASSIKEIMEKGELVPDELGNAVVKRRLSEKDCEKGFILDGFPRTVRQAEYLDSFLESQNRQLTAAVLIEIPEDEVVQRLLSRLICPKCGRIYNMIFLPPKEDELCDDCGVGLVQRLDDKEETVRHRLKVYREKTQPVIDYYSKKGILKRVDGSQGIDNVVAEVLGILGWSDK

SEQ ID NO: 1687 - DNA, 693 bp, synthetic construct
  misc_feature 1..693: note = variant of adenylate kinase from Thermotoga neapolitana
  source 1..693: mol_type = other DNA
atgcaccatcatcaccatcacgggggctccggcatgggggcatatctggtgttcttaggtccgccgggcgcgggaaaaggtacccaaggccgtattatttcggcaaagactggcatcccgcatattagcacgggcgatatcctgcgtgacatcgtcgctaagcaaaacgatgaagttgcctcgagcattaaagagatcatggagaaaggtgaactcgttccagatgaactgggtaatgcggtacagaaacgccgcctgtcggagaaagactgcgaaaaaggctttattttggatggtttcccgcgtaccgtgcgccaagcggaatatctggatagttttcttgaaagccagaatcgccagttgacagccgccgtgctgattgaggtccccgaagatgaagttgttctgcgtctgctgtctcgcctgatctgtccgaaatgcgggcgtggttacaacatgatttttctgccaccaaaagaagacgagctgtgtgacgattgcggtgtcggcttagtacagcgtttagatgataaggaagaaacggtccgtcaccgcctgaaagtctaccgtgagaagacccagccggtcattgactattatagtaagaaaggtattctcaaacgcgtagatgggtcgcaaggaatcgaccctgtggtggcagaagtcctggggattctgggttggagcgataag

SEQ ID NO: 1688 - protein, 231 aa, synthetic construct
  REGION 1..231: note = variant of adenylate kinase from Thermotoga neapolitana
MHHHHHHGGSGMGAYLVFLGPPGAGKGTQGRIISAKTGIPHISTGDILRDIVAKQNDEVASSIKEIMEKGELVPDELGNAVQKRRLSEKDCEKGFILDGFPRTVRQAEYLDSFLESQNRQLTAAVLIEVPEDEVVLRLLSRLICPKCGRGYNMIFLPPKEDELCDDCGVGLVQRLDDKEETVRHRLKVYREKTQPVIDYYSKKGILKRVDGSQGIDPVVAEVLGILGWSDK

SEQ ID NO: 1689 - DNA, 693 bp, synthetic construct
  misc_feature 1..693: note = variant of adenylate kinase from Thermotoga neapolitana
  source 1..693: mol_type = other DNA
atgcaccatcatcaccatcacgggggctccggcatgggggcatatctggtgttcttaggtccgccgggcgcgggaaaaggtacccaaggccgtattatttcggcaaagactggcatcccgcatattagcacgggcgatatcctgcgtgacatcgtcgctaagcaaaacgatgaagttgcctcgagcattaaagagatcatggagaaaggtgaactcgttccagatgaactgggtaatgcggtagttaaacgccgcctgtcggagaaagactgcgaaaaaggctttattttggatggtttcccgcgtaccgtgcgccaagcggaatatctggatagttttcttgaaagccagaatcgccagttgacagccgccgtgctgattgaggtccccgaagatgaagttgttgcacgtctgctgtctcgcctgatctgtccgaaatgcgggcgtagttacaacatgatttttctgccaccaaaagaagacgagctgtgtgacgattgcggtgtcggcttagtacagcgtttagatgataaggaagaaacggtccgtcaccgcctgaaagtctaccgtgagaagacccagccggtcattgactattatagtaagaaaggtattctcaaacgcgtagatgggtcgcaaggaatcgacaacgttgtggcagaagtcctggggattctgggttggagcgataag

SEQ ID NO: 1690 - protein, 231 aa, synthetic construct
  REGION 1..231: note = variant of adenylate kinase from Thermotoga neapolitana
MHHHHHHGGSGMGAYLVFLGPPGAGKGTQGRIISAKTGIPHISTGDILRDIVAKQNDEVASSIKEIMEKGELVPDELGNAVVKRRLSEKDCEKGFILDGFPRTVRQAEYLDSFLESQNRQLTAAVLIEVPEDEVVARLLSRLICPKCGRSYNMIFLPPKEDELCDDCGVGLVQRLDDKEETVRHRLKVYREKTQPVIDYYSKKGILKRVDGSQGIDNVVAEVLGILGWSDK

SEQ ID NO: 1691 - DNA, 693 bp, synthetic construct
  misc_feature 1..693: note = variant of adenylate kinase from Thermotoga neapolitana
  source 1..693: mol_type = other DNA
atgcaccatcatcaccatcacgggggctccggcatgggggcatatctggtgttcttaggtccgccgggcgcgggaaaaggtacccaaggccgtattatttcggcaaagactggcatcccgcatattagcacgggcgatatcctgcgtgacatcgtcgctaagcaaaacgatgaagttgcctcgagcattaaagagatcatggagaaaggtgaactcgttccagatgaactgggtccagcgagtgtaaaacgccgcctgtcggagaaagactgcgaaaaaggctttattttggatggtttcccgcgtaccgtgcgccaagcggaatatctggatagttttcttgaaagccagaatcgccagttgacagccgccgtgctgattgaggtccccgaagatgaagttgttcagcgtctgctgtctcgcctggcctgtccgaaatgcgggcgtatctacaacatgattttttgtccaccaaaagaagacgagctgtgtgacgattgcggtgtcggcttagtacagcgtttagatgataaggaagaaacggtccgtcaccgcctgaaagtctaccgtgagaagacccagccggtcattgactattatagtaagaaaggtattctcaaacgcgtagatgggatccaaggaatcgacaacgttgtggcagaagtcctggggattctgggtgggagcgataag

SEQ ID NO: 1692 - protein, 231 aa, synthetic construct
  REGION 1..231: note = variant of adenylate kinase from Thermotoga neapolitana
MHHHHHHGGSGMGAYLVFLGPPGAGKGTQGRIISAKTGIPHISTGDILRDIVAKQNDEVASSIKEIMEKGELVPDELGPASVKRRLSEKDCEKGFILDGFPRTVRQAEYLDSFLESQNRQLTAAVLIEVPEDEVVQRLLSRLACPKCGRIYNMIFCPPKEDELCDDCGVGLVQRLDDKEETVRHRLKVYREKTQPVIDYYSKKGILKRVDGIQGIDNVVAEVLGILGGSDK

SEQ ID NO: 1693 - DNA, 693 bp, synthetic construct
  misc_feature 1..693: note = variant of adenylate kinase from Thermotoga neapolitana
  source 1..693: mol_type = other DNA
atgcaccatcatcaccatcacgggggctccggcatgggggcatatctggtgttcttaggtccgccgggcgcgggaaaaggtacccaaggccgtattatttcggcaaagactggcatcccgcatattagcacgggcgatatcctgcgtgacatcgtcgctaagcaaaacgatgaagttgcctcgagcattaaagagatcatggagaaaggtgaactcgttccagatgaactgggtaatgcggtacagaaacgccgcctgtcggagaaagactgcgaaaaaggctttattttggatggtttcccgcgtaccgtgcgccaagcggaatatctggatagttttcttgaaagccagaatcgccagttgacagccgccgtgctgattgaggtccccgaagatgaagttgttgcacgtctgctgtctcgcctgatctgtccgaaatgcgggcgtatttacaacatgatttttctgccaccaaaagaagacgagctgtgtgacgattgcggtgtcggcttagtacagcgtttagatgataaggaagaaacggtccgtcaccgcctgaaagtctaccgtgagaagacccagccggtcattgactattatagtaagaaaggtattctcaaacgcgtagatgggtcgcaaggaatcgacaacgttgtggcagaagtcctggggattctgggttggagcgataag

SEQ ID NO: 1694 - protein, 231 aa, synthetic construct
  REGION 1..231: note = variant of adenylate kinase from Thermotoga neapolitana
MHHHHHHGGSGMGAYLVFLGPPGAGKGTQGRIISAKTGIPHISTGDILRDIVAKQNDEVASSIKEIMEKGELVPDELGNAVQKRRLSEKDCEKGFILDGFPRTVRQAEYLDSFLESQNRQLTAAVLIEVPEDEVVARLLSRLICPKCGRIYNMIFLPPKEDELCDDCGVGLVQRLDDKEETVRHRLKVYREKTQPVIDYYSKKGILKRVDGSQGIDNVVAEVLGILGWSDK

SEQ ID NO: 1695 - DNA, 693 bp, synthetic construct
  misc_feature 1..693: note = variant of adenylate kinase from Thermotoga neapolitana
  source 1..693: mol_type = other DNA
atgcaccatcatcaccatcacgggggctccggcatgggggcatatctggtgttcttaggtccgccgggcgcgggaaaaggtacccaaggccgtattatttcggcaaagactggcatcccgcatattagcacgggcgatatcctgcgtgacatcgtcgctaagcaaaacgatgaagttgcctcgagcattaaagagatcatggagaaaggtgaactcgttccagatgaactgggtccagcgagtgtaaaacgccgcctgtcggagaaagactgcgaaaaaggctttattttggatggtttcccgcgtaccgtgcgccaagcggaatatctggatagttttcttgaaagccagaatcgccagttgacagccgccgtgctgattgaggtccccgaagatgaagttgttcagcgtctgctgtctcgcctggcctgtccgaaatgcgggcgtatctacaacatgatttttctgccaccaaaagaagacgagctgtgtgacgattgcggtgtcggcttagtacagcgtttagatgataaggaagaaacggtccgtcaccgcctgaaagtctaccgtgagaagacccagccggtcattgactattatagtaagaaaggtattctcaaacgcgtagatgggatccaaggaatcgacaacgttgtggcagaagtcctggggattctgggttggagcgataag

SEQ ID NO: 1696 - protein, 231 aa, synthetic construct
  REGION 1..231: note = variant of adenylate kinase from Thermotoga neapolitana
MHHHHHHGGSGMGAYLVFLGPPGAGKGTQGRIISAKTGIPHISTGDILRDIVAKQNDEVASSIKEIMEKGELVPDELGPASVKRRLSEKDCEKGFILDGFPRTVRQAEYLDSFLESQNRQLTAAVLIEVPEDEVVQRLLSRLACPKCGRIYNMIFLPPKEDELCDDCGVGLVQRLDDKEETVRHRLKVYREKTQPVIDYYSKKGILKRVDGIQGIDNVVAEVLGILGWSDK

SEQ ID NO: 1697 - DNA, 693 bp, synthetic construct
  misc_feature 1..693: note = variant of adenylate kinase from Thermotoga neapolitana
  source 1..693: mol_type = other DNA
atgcaccatcatcaccatcacgggggctccggcatgggggcatatctggtgttcttaggtccgccgggcgcgggaaaaggtacccaaggccgtattatttcggcaaagactggcatcccgcatattagcacgggcgatatcctgcgtgacatcgtcgctaagcaaaacgatgaagttgcctcgagcattaaagagatcatggagaaaggtgaactcgttccagatgaactgggtaatgcggtagttaaacgccgcctgtcggagaaagactgcgaaaaaggctttattttggatggtttcccgcgtaccgtgcgccaagcggaatatctggatagttttcttgaaagccagaatcgccagttgacagccgccgtgctgattgaggtccccgaagatgaagttgttcagcgtctgctgtctcgcctgatctgtccgaaatgcgggcgtatctacaacatgatttttctgccaccaaaagaagacgagctgtgtgacgattgcggtgtcggcttagtacagcgtttagatgataaggaagaaacggtccgtcaccgcctgaaagtctaccgtgagaagacccagccggtcattgactattatagtaagaaaggtattctcaaacgcgtagatgggtcgcaaggaatcgaccctgtggtggcagaagtcctggggattctgggttggagcgataag

SEQ ID NO: 1698 - protein, 231 aa, synthetic construct
  REGION 1..231: note = variant of adenylate kinase from Thermotoga neapolitana
MHHHHHHGGSGMGAYLVFLGPPGAGKGTQGRIISAKTGIPHISTGDILRDIVAKQNDEVASSIKEIMEKGELVPDELGNAVVKRRLSEKDCEKGFILDGFPRTVRQAEYLDSFLESQNRQLTAAVLIEVPEDEVVQRLLSRLICPKCGRIYNMIFLPPKEDELCDDCGVGLVQRLDDKEETVRHRLKVYREKTQPVIDYYSKKGILKRVDGSQGIDPVVAEVLGILGWSDK

SEQ ID NO: 1699 - DNA, 693 bp, synthetic construct
  misc_feature 1..693: note = variant of adenylate kinase from Thermotoga neapolitana
  source 1..693: mol_type = other DNA
atgcaccatcatcaccatcacgggggctccggcatgggggcatatctggtgttcttaggtccgccgggcgcgggaaaaggtacccaaggccgtattatttcggcaaagactggcatcccgcatattagcacgggcgatatcctgcgtgacatcgtcgctaagcaaaacgatgaagttgcctcgagcattaaagagatcatggagaaaggtgaactcgttccagatgaactgggtccagcggtcgtaaaacgccgcctgtcggagaaagactgcgaaaaaggctttattttggatggtttcccgcgtaccgtgcgccaagcggaatatctggatagttttcttgaaagccagaatcgccagttgacagccgccgtgctgattgaggtccccgaagatttcgttgttcagcgtctgctgtctcgcctgatctgtccgaaatgcgggcgtatctacaacatgatttttctgccaccaaaagaagacgagctgtgtgacgattgcggtgtcggcttagtacagcgtttagatgataaggaagaaacggtccgtcaccgcctgaaagtctaccgtgagaagacccagccggtcattgactattatagtaagaaaggtattctcaaacgcgtagatgggtcgcaaggaatcgacaacgttgtggcagaagtcctggggattctgggtctgagcgataag

SEQ ID NO: 1700 - protein, 231 aa, synthetic construct
  REGION 1..231: note = variant of adenylate kinase from Thermotoga neapolitana
MHHHHHHGGSGMGAYLVFLGPPGAGKGTQGRIISAKTGIPHISTGDILRDIVAKQNDEVASSIKEIMEKGELVPDELGPAVVKRRLSEKDCEKGFILDGFPRTVRQAEYLDSFLESQNRQLTAAVLIEVPEDFVVQRLLSRLICPKCGRIYNMIFLPPKEDELCDDCGVGLVQRLDDKEETVRHRLKVYREKTQPVIDYYSKKGILKRVDGSQGIDNVVAEVLGILGLSDK

SEQ ID NO: 1701 - DNA, 693 bp, synthetic construct
  misc_feature 1..693: note = variant of adenylate kinase from Thermotoga neapolitana
  source 1..693: mol_type = other DNA
atgcaccatcatcaccatcacgggggctccggcatgggggcatatctggtgttcttaggtccgccgggcgcgggaaaaggtacccaaggccgtattatttcggcaaagactggcatcccgcatattagcacgggcgatatcctgcgtgacatcgtcgctaagcaaaacgatgaagttgcctcgagcattaaagagatcatggagaaaggtgaactcgttccagatgaactgggtaacgcgagtgtaaaacgccgcctgtcggagaaagactgcgaaaaaggctttattttggatggtttcccgcgtaccgtgcgccaagcggaatatctggatagttttcttgaaagccagaatcgccagttgacagccgccgtgctgattgaggtccccgaagatgaagttgttcagcgtctgctgtctcgcctggcctgtccgaaatgcgggcgtatctacaacatgatttttaccccaccaaaagaagacgagctgtgtgacgattgcggtgtcggcttagtacagcgtttagatgataaggaagaaacggtccgtcaccgcctgaaagtctaccgtgagaagacccagccggtcattgactattatagtaagaaaggtattctcaaacgcgtagatgggatccaaggaatcgacaacgttgtggcagaagtcctggggattctgggttggagcgataag

SEQ ID NO: 1702 - protein, 231 aa, synthetic construct
  REGION 1..231: note = variant of adenylate kinase from Thermotoga neapolitana
MHHHHHHGGSGMGAYLVFLGPPGAGKGTQGRIISAKTGIPHISTGDILRDIVAKQNDEVASSIKEIMEKGELVPDELGNASVKRRLSEKDCEKGFILDGFPRTVRQAEYLDSFLESQNRQLTAAVLIEVPEDEVVQRLLSRLACPKCGRIYNMIFTPPKEDELCDDCGVGLVQRLDDKEETVRHRLKVYREKTQPVIDYYSKKGILKRVDGIQGIDNVVAEVLGILGWSDK

SEQ ID NO: 1703 - DNA, 693 bp, synthetic construct
  misc_feature 1..693: note = variant of adenylate kinase from Thermotoga neapolitana
  source 1..693: mol_type = other DNA
atgcaccatcatcaccatcacgggggctccggcatgggggcatatctggtgttcttaggtccgccgggcgcgggaaaaggtacccaaggccgtattatttcggcaaagactggcatcccgcatattagcacgggcgatatcctgcgtgacatcgtcgctaagcaaaacgatgaagttgcctcgagcattaaagagatcatggagaaaggtgaactcgttccagatgaactgggtaatgcggtagttaaacgccgcctgtcggagaaagactgcgaaaaaggctttattttggatggtttcccgcgtaccgtgcgccaagcggaatatctggatagttttcttgaaagccagaatcgccagttgacagccgccgtgctgattgaggtccccgaagatgaagttgttgcacgtctgctgtctcgcctgatctgtccgaaatgcgggcgtatctacaacatgatttttctgccaccaaaagaagacgagctgtgtgacgattgcggtgtcggcttagtacagcgtttagatgataaggaagaaacggtccgtcaccgcctgaaagtctaccgtgagaagacccagccggtcattgactattatagtaagaaaggtattctcaaacgcgtagatgggtcgcaaggaatcgacaatgtggcggcagaagtcctggggattctgggttggagcgataag

SEQ ID NO: 1704 - protein, 231 aa, synthetic construct
  REGION 1..231: note = variant of adenylate kinase from Thermotoga neapolitana
MHHHHHHGGSGMGAYLVFLGPPGAGKGTQGRIISAKTGIPHISTGDILRDIVAKQNDEVASSIKEIMEKGELVPDELGNAVVKRRLSEKDCEKGFILDGFPRTVRQAEYLDSFLESQNRQLTAAVLIEVPEDEVVARLLSRLICPKCGRIYNMIFLPPKEDELCDDCGVGLVQRLDDKEETVRHRLKVYREKTQPVIDYYSKKGILKRVDGSQGIDNVAAEVLGILGWSDK

SEQ ID NO: 1705 - DNA, 693 bp, synthetic construct
  misc_feature 1..693: note = variant of adenylate kinase from Thermotoga neapolitana
  source 1..693: mol_type = other DNA
atgcaccatcatcaccatcacgggggctccggcatgggggcatatctggtgttcttaggtccgccgggcgcgggaaaaggtacccaaggccgtattatttcggcaaagactggcatcccgcatattagcacgggcgatatcctgcgtgacatcgtcgctaagcaaaacgatgaagttgcctcgagcattaaagagatcatggagaaaggtgaactcgttccagatgaactgggtaatgcggtacagaaacgccgcctgtcggagaaagactgcgaaaaaggctttattttggatggtttcccgcgtaccgtgcgccaagcggaatatctggatagttttcttgaaagccagaatcgccagttgacagccgccgtgctgattgaggtccccgaagatgaagttgttgcacgtctgctgtctcgcctgatctgtccgaaatgcgggcgtatctacaacatgatttttctgccaccaaaagaagacgagctgtgtgacgattgcggtgtcggcttagtacagcgtttagatgataaggaagaaacggtccgtcaccgcctgaaagtctaccgtgagaagacccagccggtcattgactattatagtaagaaaggtattctcaaacgcgtagatgggtcgcaaggaatcgacaacgttgtggcagaagtcctggggattccgggttggagcgataag

SEQ ID NO: 1706 - protein, 231 aa, synthetic construct
  REGION 1..231: note = variant of adenylate kinase from Thermotoga neapolitana
MHHHHHHGGSGMGAYLVFLGPPGAGKGTQGRIISAKTGIPHISTGDILRDIVAKQNDEVASSIKEIMEKGELVPDELGNAVQKRRLSEKDCEKGFILDGFPRTVRQAEYLDSFLESQNRQLTAAVLIEVPEDEVVARLLSRLICPKCGRIYNMIFLPPKEDELCDDCGVGLVQRLDDKEETVRHRLKVYREKTQPVIDYYSKKGILKRVDGSQGIDNVVAEVLGIPGWSDK

SEQ ID NO: 1707 - DNA, 693 bp, synthetic construct
  misc_feature 1..693: note = variant of adenylate kinase from Thermotoga neapolitana
  source 1..693: mol_type = other DNA
atgcaccatcatcaccatcacgggggctccggcatgggggcatatctggtgttcttaggtccgccgggcgcgggaaaaggtacccaaggccgtattatttcggcaaagactggcatcccgcatattagcacgggcgatatcctgcgtgacatcgtcgctaagcaaaacgatgaagttgcctcgagcattaaagagatcatggagaaaggtgaactcgttccagatgaactgggtaatgcggtagtaaaacgccgcctgtcggagaaagactgcgaaaaaggctttattttggatggtttcccgcgtaccgtgcgccaagcggaatatctggatagttttcttgaaagccagaatcgccagttgacagccgccgtgctgattgaggtccccgaagatgaagttgttgcacgtctgctgtctcgcctgatctgtccgaaatgcgggcgtagttacaacatgatttttctgccaccaaaagaagacgagctgtgtgacgattgcggtgtcggcttagtacagcgtttagatgataaggaagaaacggtccgtcaccgcctgaaagtctaccgtgagaagacccagccggtcattgactattatagtaagaaaggtattctcaaacgcgtagatgggtcgcaaggaatcgaccctgtggtggcagaagtcctggggattctgggttggagcgataag

SEQ ID NO: 1708 - protein, 231 aa, synthetic construct
  REGION 1..231: note = variant of adenylate kinase from Thermotoga neapolitana
MHHHHHHGGSGMGAYLVFLGPPGAGKGTQGRIISAKTGIPHISTGDILRDIVAKQNDEVASSIKEIMEKGELVPDELGNAVVKRRLSEKDCEKGFILDGFPRTVRQAEYLDSFLESQNRQLTAAVLIEVPEDEVVARLLSRLICPKCGRSYNMIFLPPKEDELCDDCGVGLVQRLDDKEETVRHRLKVYREKTQPVIDYYSKKGILKRVDGSQGIDPVVAEVLGILGWSDK

SEQ ID NO: 1709 - DNA, 693 bp, synthetic construct
  misc_feature 1..693: note = variant of adenylate kinase from Thermotoga neapolitana
  source 1..693: mol_type = other DNA
atgcaccatcatcaccatcacgggggctccggcatgggggcatatctggtgttcttaggtccgccgggcgcgggaaaaggtacccaaggccgtattatttcggcaaagactggcatcccgcatattagcacgggcgatatcctgcgtgacatcgtcgctaagcaaaacgatgaagttgcctcgagcattaaagagatcatggagaaaggtgaactcgttccagatgaactgggtaatgcggtagttaaacgccgcctgtcggagaaagactgcgaaaaaggctttattttggatggtttcccgcgtaccgtgcgccaagcggaatatctggatagttttcttgaaagccagaatcgccagttgacagccgccgtgctgattgaggtccccgaagatgaagttgttgcacgtctgctgtctcgcctgatctgtccgaaatgcgggcgtggttacaacatgatttttctgccaccaaaagaagacgagctgtgtgacgattgcggtgtcggcttagtacagcgtttagatgataaggaagaaacggtccgtcaccgcctgaaagtctaccgtgagaagacccagccggtcattgactattatagtaagaaaggtattctcaaacgcgtagatgggtcgcaaggaatcgacaacgttgtggcagaagtcctggggattctgggttggagcgataag

SEQ ID NO: 1710 - protein, 231 aa, synthetic construct
  REGION 1..231: note = variant of adenylate kinase from Thermotoga neapolitana
MHHHHHHGGSGMGAYLVFLGPPGAGKGTQGRIISAKTGIPHISTGDILRDIVAKQNDEVASSIKEIMEKGELVPDELGNAVVKRRLSEKDCEKGFILDGFPRTVRQAEYLDSFLESQNRQLTAAVLIEVPEDEVVARLLSRLICPKCGRGYNMIFLPPKEDELCDDCGVGLVQRLDDKEETVRHRLKVYREKTQPVIDYYSKKGILKRVDGSQGIDNVVAEVLGILGWSDK

SEQ ID NO: 1711 - DNA, 693 bp, synthetic construct
  misc_feature 1..693: note = variant of adenylate kinase from Thermotoga neapolitana
  source 1..693: mol_type = other DNA
atgcaccatcatcaccatcacgggggctccggcatgggggcatatctggtgttcttaggtccgccgggcgcgggaaaaggtacccaaggccgtattatttcggcaaagactggcatcccgcatattagcacgggcgatatcctgcgtgacatcgtcgctaagcaaaacgatgaagttgcctcgagcattaaagagatcatggagaaaggtgaactcgttccagatgaactgggtaatgcggtagtaaaacgccgcctgtcggagaaagactgcgaaaaaggctttattttggatggtttcccgcgtaccgtgcgccaagcggaatatctggatagttttcttgaaagccagaatcgccagttgacagccgccgtgctgattgaggtccccgaagatttcgttgttcagcgtctgctgtctcgcctgatctgtccgaaatgcgggcgtatctacaacatgatttttctgccaccaaaagaagacgagctgtgtgacgattgcggtgtcggcttagtacagcgtttagatgataaggaagaaacggtccgtcaccgcctgaaagtctaccgtgagaagacccagccggtcattgactattatagtaagaaaggtattctcaaacgcgtagatgggtcgcaaggaatcgacaacgttgtggcagaagtcctggggattctgggttggagcgataag

SEQ ID NO: 1712 - protein, 231 aa, synthetic construct
  REGION 1..231: note = variant of adenylate kinase from Thermotoga neapolitana
MHHHHHHGGSGMGAYLVFLGPPGAGKGTQGRIISAKTGIPHISTGDILRDIVAKQNDEVASSIKEIMEKGELVPDELGNAVVKRRLSEKDCEKGFILDGFPRTVRQAEYLDSFLESQNRQLTAAVLIEVPEDFVVQRLLSRLICPKCGRIYNMIFLPPKEDELCDDCGVGLVQRLDDKEETVRHRLKVYREKTQPVIDYYSKKGILKRVDGSQGIDNVVAEVLGILGWSDK

SEQ ID NO: 1713 - DNA, 693 bp, synthetic construct
  misc_feature 1..693: note = variant of adenylate kinase from Thermotoga neapolitana
  source 1..693: mol_type = other DNA
atgcaccatcatcaccatcacgggggctccggcatgggggcatatctggtgttcttaggtccgccgggcgcgggaaaaggtacccaaggccgtattatttcggcaaagactggcatcccgcatattagcacgggcgatatcctgcgtgacatcgtcgctaagcaaaacgatgaagttgcctcgagcattaaagagatcatggagaaaggtgaactcgttccagatgaactgggtaatgcggtagtaaaacgccgcctgtcggagaaagactgcgaaaaaggctttattttggatggtttcccgcgtaccgtgcgccaagcggaatatctggatagttttcttgaaagccagaatcgccagttgacagccgccgtgctgattgaggtccccgaagatttcgttgttcagcgtctgctgtctcgcctgatctgtccgaaatgcgggcgtatctacaacatgattttttgtccaccaaaagaagacgagctgtgtgacgattgcggtgtcggcttagtacagcgtttagatgataaggaagaaacggtccgtcaccgcctgaaagtctaccgtgagaagacccagccggtcattgactattatagtaagaaaggtattctcaaacgcgtagatgggtcgcaaggaatcgacaacgttgtggcagaagtcctggggattctgggttggagcgataag

SEQ ID NO: 1714 - protein, 231 aa, synthetic construct
  REGION 1..231: note = variant of adenylate kinase from Thermotoga neapolitana
MHHHHHHGGSGMGAYLVFLGPPGAGKGTQGRIISAKTGIPHISTGDILRDIVAKQNDEVASSIKEIMEKGELVPDELGNAVVKRRLSEKDCEKGFILDGFPRTVRQAEYLDSFLESQNRQLTAAVLIEVPEDFVVQRLLSRLICPKCGRIYNMIFCPPKEDELCDDCGVGLVQRLDDKEETVRHRLKVYREKTQPVIDYYSKKGILKRVDGSQGIDNVVAEVLGILGWSDK

SEQ ID NO: 1715 - DNA, 693 bp, synthetic construct
  misc_feature 1..693: note = variant of adenylate kinase from Thermotoga neapolitana
  source 1..693: mol_type = other DNA
atgcaccatcatcaccatcacgggggctccggcatgggggcatatctggtgttcttaggtccgccgggcgcgggaaaaggtacccaaggccgtattatttcggcaaagactggcatcccgcatattagcacgggcgatatcctgcgtgacatcgtcgctaagcaaaacgatgaagttgcctcgagcattaaagagatcatggagaaaggtgaactcgttccagatgaactgggtaatgcggtagtaaaacgccgcctgtcggagaaagactgcgaaaaaggctttattttggatggtttcccgcgtaccgtgcgccaagcggaatatctggatagttttcttgaaagccagaatcgccagttgacagccgccgtgctgattgaggtccccgaagatttcgttgttcagcgtctgctgtctcgcctggcctgtccgaaatgcgggcgtatctacaacatgatttttctgccaccaaaagaagacgagctgtgtgacgattgcggtgtcggcttagtacagcgtttagatgataaggaagaaacggtccgtcaccgcctgaaagtctaccgtgagaagacccagccggtcattgactattatagtaagaaaggtattctcaaacgcgtagatgggtcgcaaggaatcgacaacgttgtggcagaagtcctggggattctgggtctgagcgataag

SEQ ID NO: 1716 - protein, 231 aa, synthetic construct
  REGION 1..231: note = variant of adenylate kinase from Thermotoga neapolitana
MHHHHHHGGSGMGAYLVFLGPPGAGKGTQGRIISAKTGIPHISTGDILRDIVAKQNDEVASSIKEIMEKGELVPDELGNAVVKRRLSEKDCEKGFILDGFPRTVRQAEYLDSFLESQNRQLTAAVLIEVPEDFVVQRLLSRLACPKCGRIYNMIFLPPKEDELCDDCGVGLVQRLDDKEETVRHRLKVYREKTQPVIDYYSKKGILKRVDGSQGIDNVVAEVLGILGLSDK

SEQ ID NO: 1717 - DNA, 693 bp, synthetic construct
  misc_feature 1..693: note = variant of adenylate kinase from Thermotoga neapolitana
  source 1..693: mol_type = other DNA
atgcaccatcatcaccatcacgggggctccggcatgggggcatatctggtgttcttaggtccgccgggcgcgggaaaaggtacccaaggccgtattatttcggcaaagactggcatcccgcatattagcacgggcgatatcctgcgtgacatcgtcgctaagcaaaacgatgaagttgcctcgagcattaaagagatcatggagaaaggtgaactcgttccagatgaactgggtaatgcggtagttaaacgccgcctgtcggagaaagactgcgaaaaaggctttattttggatggtttcccgcgtaccgtgcgccaagcggaatatctggatagttttcttgaaagccagaatcgccagttgacagccgccgtgctgattgaggtccccgaagatgaagttgttctgcgtctgctgtctcgcctgatctgtccgaaatgcgggcgtatttacaacatgatttttctgccaccaaaagaagacgagctgtgtgacgattgcggtgtcggcttagtacagcgtttagatgataaggaagaaacggtccgtcaccgcctgaaagtctaccgtgagaagacccagccggtcattgactattatagtaagaaaggtattctcaaacgcgtagatgggtcgcaaggaatcgacaacgttgtggcagaagtcctggggattctgggttggagcgataag

SEQ ID NO: 1718 - protein, 231 aa, synthetic construct
  REGION 1..231: note = variant of adenylate kinase from Thermotoga neapolitana
MHHHHHHGGSGMGAYLVFLGPPGAGKGTQGRIISAKTGIPHISTGDILRDIVAKQNDEVASSIKEIMEKGELVPDELGNAVVKRRLSEKDCEKGFILDGFPRTVRQAEYLDSFLESQNRQLTAAVLIEVPEDEVVLRLLSRLICPKCGRIYNMIFLPPKEDELCDDCGVGLVQRLDDKEETVRHRLKVYREKTQPVIDYYSKKGILKRVDGSQGIDNVVAEVLGILGWSDK

SEQ ID NO: 1719 - DNA, 693 bp, synthetic construct
  misc_feature 1..693: note = variant of adenylate kinase from Thermotoga neapolitana
  source 1..693: mol_type = other DNA
atgcaccatcatcaccatcacgggggctccggcatgggggcatatctggtgttcttaggtccgccgggcgcgggaaaaggtacccaaggccgtattatttcggcaaagactggcatcccgcatattagcacgggcgatatcctgcgtgacatcgtcgctaagcaaaacgatgaagttgcctcgagcattaaagagatcatggagaaaggtgaactcgttccagatgaactgggtaatgcggtagtaaaacgccgcctgtcggagaaagactgcgaaaaaggctttattttggatggtttcccgcgtaccgtgcgccaagcggaatatctggatagttttcttgaaagccagaatcgccagttgacagccgccgtgctgattgaggtccccgaagatgaagttgttcagcgtctgctgtctcgcctgatctgtccgaaatgcgggcgtagttacaacatgatttttctgccaccaaaagaagacgagctgtgtgacgattgcggtgtcggcttagtacagcgtttagatgataaggaagaaacggtccgtcaccgcctgaaagtctaccgtgagaagacccagccggtcattgactattatagtaagaaaggtattctcaaacgcgtagatgggtcgcaaggaatcgaccctgtggtggcagaagtcctggggattctgggttggagcgataag

SEQ ID NO: 1720 - protein, 231 aa, synthetic construct
  REGION 1..231: note = variant of adenylate kinase from Thermotoga neapolitana
MHHHHHHGGSGMGAYLVFLGPPGAGKGTQGRIISAKTGIPHISTGDILRDIVAKQNDEVASSIKEIMEKGELVPDELGNAVVKRRLSEKDCEKGFILDGFPRTVRQAEYLDSFLESQNRQLTAAVLIEVPEDEVVQRLLSRLICPKCGRSYNMIFLPPKEDELCDDCGVGLVQRLDDKEETVRHRLKVYREKTQPVIDYYSKKGILKRVDGSQGIDPVVAEVLGILGWSDK

SEQ ID NO: 1721 - DNA, 693 bp, synthetic construct
  misc_feature 1..693: note = variant of adenylate kinase from Thermotoga neapolitana
  source 1..693: mol_type = other DNA
atgcaccatcatcaccatcacgggggctccggcatgggggcatatctggtgttcttaggtccgccgggcgcgggaaaaggtacccaaggccgtattatttcggcaaagactggcatcccgcatattagcacgggcgatatcctgcgtgacatcgtcgctaagcaaaacgatgaagttgcctcgagcattaaagagatcatggagaaaggtgaactcgttccagatgaactgggtaatgcggtacagaaacgccgcctgtcggagaaagactgcgaaaaaggctttattttggatggtttcccgcgtaccgtgcgccaagcggaatatctggatagttttcttgaaagccagaatcgccagttgacagccgccgtgctgattgaggtccccgaagatgaagttgttgcacgtctgctgtctcgcctgatctgtccgaaatgcgggcgtagttacaacatgatttttctgccaccaaaagaagacgagctgtgtgacgattgcggtgtcggcttagtacagcgtttagatgataaggaagaaacggtccgtcaccgcctgaaagtctaccgtgagaagacccagccggtcattgactattatagtaagaaaggtattctcaaacgcgtagatgggtcgcaaggaatcgacaacgttgtggcagaagtcctggggattctgggttggagcgataag

SEQ ID NO: 1722 - protein, 231 aa, synthetic construct
  REGION 1..231: note = variant of adenylate kinase from Thermotoga neapolitana
MHHHHHHGGSGMGAYLVFLGPPGAGKGTQGRIISAKTGIPHISTGDILRDIVAKQNDEVASSIKEIMEKGELVPDELGNAVQKRRLSEKDCEKGFILDGFPRTVRQAEYLDSFLESQNRQLTAAVLIEVPEDEVVARLLSRLICPKCGRSYNMIFLPPKEDELCDDCGVGLVQRLDDKEETVRHRLKVYREKTQPVIDYYSKKGILKRVDGSQGIDNVVAEVLGILGWSDK

SEQ ID NO: 1723 - DNA, 693 bp, synthetic construct
  misc_feature 1..693: note = variant of adenylate kinase from Thermotoga neapolitana
  source 1..693: mol_type = other DNA
atgcaccatcatcaccatcacgggggctccggcatgggggcatatctggtgttcttaggtccgccgggcgcgggaaaaggtacccaaggccgtattatttcggcaaagactggcatcccgcatattagcacgggcgatatcctgcgtgacatcgtcgctaagcaaaacgatgaagttgcctcgagcattaaagagatcatggagaaaggtgaactcgttccagatgaactgggtaacgcgagtgtaaaacgccgcctgtcggagaaagactgcgaaaaaggctttattttggatggtttcccgcgtaccgtgcgccaagcggaatatctggatagttttcttgaaagccagaatcgccagttgacagccgccgtgctgattgaggtccccgaagatgaagttgttcagcgtctgctgtctcgcctgatttgtccgaaatgcgggcgtatctacaacatgatttttctgccaccaaaagaagacgagctgtgtgacgattgcggtgtcggcttagtacagcgtttagatgataaggaagaaacggtccgtcaccgcctgaaagtctaccgtgagaagacccagccggtcattgactattatagtaagaaaggtattctcaaacgcgtagatgggtcgcaaggaatcgacaacgttgtggcagaagtcctggggattctgggttggagcgataag

SEQ ID NO: 1724 - protein, 231 aa, synthetic construct
  REGION 1..231: note = variant of adenylate kinase from Thermotoga neapolitana
MHHHHHHGGSGMGAYLVFLGPPGAGKGTQGRIISAKTGIPHISTGDILRDIVAKQNDEVASSIKEIMEKGELVPDELGNASVKRRLSEKDCEKGFILDGFPRTVRQAEYLDSFLESQNRQLTAAVLIEVPEDEVVQRLLSRLICPKCGRIYNMIFLPPKEDELCDDCGVGLVQRLDDKEETVRHRLKVYREKTQPVIDYYSKKGILKRVDGSQGIDNVVAEVLGILGWSDK

SEQ ID NO: 1725 - DNA, 693 bp, synthetic construct
  misc_feature 1..693: note = variant of adenylate kinase from Thermotoga neapolitana
  source 1..693: mol_type = other DNA
atgcaccatcatcaccatcacgggggctccggcatgggggcatatctggtgttcttaggtccgccgggcgcgggaaaaggtacccaaggccgtattatttcggcaaagactggcatcccgcatattagcacgggcgatatcctgcgtgacatcgtcgctaagcaaaacgatgaagttgcctcgagcattaaagagatcatggagaaaggtgaactcgttccagatgaactgggtaacgcgagtgtaaaacgccgcctgtcggagaaagactgcgaaaaaggctttattttggatggtttcccgcgtaccgtgcgccaagcggaatatctggatagttttcttgaaagccagaatcgccagttgacagccgccgtgctgattgaggtccccgaagatgaagttgttcagcgtctgctgtctcgcctgacctgtccgaaatgcgggcgtatctacaacatgatttttctgccaccaaaagaagacgagctgtgtgacgattgcggtgtcggcttagtacagcgtttagatgataaggaagaaacggtccgtcaccgcctgaaagtctaccgtgagaagacccagccggtcattgactattatagtaagaaaggtattctcaaacgcgtagatgggtcgcaaggaatcgacaacgttgtggcagaagtcctggggattctgggttggagcgataag

SEQ ID NO: 1726 - protein, 231 aa, synthetic construct
  REGION 1..231: note = variant of adenylate kinase from Thermotoga neapolitana
MHHHHHHGGSGMGAYLVFLGPPGAGKGTQGRIISAKTGIPHISTGDILRDIVAKQNDEVASSIKEIMEKGELVPDELGNASVKRRLSEKDCEKGFILDGFPRTVRQAEYLDSFLESQNRQLTAAVLIEVPEDEVVQRLLSRLTCPKCGRIYNMIFLPPKEDELCDDCGVGLVQRLDDKEETVRHRLKVYREKTQPVIDYYSKKGILKRVDGSQGIDNVVAEVLGILGWSDK

SEQ ID NO: 1727 - DNA, 693 bp, synthetic construct
  misc_feature 1..693: note = variant of adenylate kinase from Thermotoga neapolitana
  source 1..693: mol_type = other DNA
atgcaccatcatcaccatcacgggggctccggcatgggggcatatctggtgttcttaggtccgccgggcgcgggaaaaggtacccaaggccgtattatttcggcaaagactggcatcccgcatattagcacgggcgatatcctgcgtgacatcgtcgctaagcaaaacgatgaagttgcctcgagcattaaagagatcatggagaaaggtgaactcgttccagatgaactgggtaacgcgagtgtaaaacgccgcctgtcggagaaagactgcgaaaaaggctttattttggatggtttcccgcgtaccgtgcgccaagcggaatatctggatagttttcttgaaagccagaatcgccagttgacagccgccgtgctgattgaggtccccgaagatttcgttgttcagcgtctgctgtctcgcctgatttgtccgaaatgcgggcgtatctacaacatgatttttctgccaccaaaagaagacgagctgtgtgacgattgcggtgtcggcttagtacagcgtttagatgataaggaagaaacggtccgtcaccgcctgaaagtctaccgtgagaagacccagccggtcattgactattatagtaagaaaggtattctcaaacgcgtagatgggtcgcaaggaatcgacaacgttgtggcagaagtcctggggattctgggtctgagcgataag

SEQ ID NO: 1728 - protein, 231 aa, synthetic construct
  REGION 1..231: note = variant of adenylate kinase from Thermotoga neapolitana
MHHHHHHGGSGMGAYLVFLGPPGAGKGTQGRIISAKTGIPHISTGDILRDIVAKQNDEVASSIKEIMEKGELVPDELGNASVKRRLSEKDCEKGFILDGFPRTVRQAEYLDSFLESQNRQLTAAVLIEVPEDFVVQRLLSRLICPKCGRIYNMIFLPPKEDELCDDCGVGLVQRLDDKEETVRHRLKVYREKTQPVIDYYSKKGILKRVDGSQGIDNVVAEVLGILGLSDK

SEQ ID NO: 1729 - DNA, 693 bp, synthetic construct
  misc_feature 1..693: note = variant of adenylate kinase from Thermotoga neapolitana
  source 1..693: mol_type = other DNA
atgcaccatcatcaccatcacgggggctccggcatgggggcatatctggtgttcttaggtccgccgggcgcgggaaaaggtacccaaggccgtattatttcggcaaagactggcatcccgcatattagcacgggcgatatcctgcgtgacatcgtcgctaagcaaaacgatgaagttgcctcgagcattaaagagatcatggagaaaggtgaactcgttccagatgaactgggtaatgcggtcgtaaaacgccgcctgtcggagaaagactgcgaaaaaggctttattttggatggtttcccgcgtaccgtgcgccaagcggaatatctggatagttttcttgaaagccagaatcgccagttgacagccgccgtgctgattgaggtccccgaagatgaagttgttcagcgtctgctgtctcgcctggcctgtccgaaatgcgggcgtatctacaacatgatttttctgccaccaaaagaagacgagctgtgtgacgattgcggtgtcggcttagtacagcgtttagatgataaggaagaaacggtccgtcaccgcctgaaagtctaccgtgagaagacccagccggtcattgactattatagtaagaaaggtattctcaaacgcgtagatgggtcgcaaggaatcgacaacgttgtggcagaagtcctggggattctgggtctgagcgataag

SEQ ID NO: 1730 - protein, 231 aa, synthetic construct
  REGION 1..231: note = variant of adenylate kinase from Thermotoga neapolitana
MHHHHHHGGSGMGAYLVFLGPPGAGKGTQGRIISAKTGIPHISTGDILRDIVAKQNDEVASSIKEIMEKGELVPDELGNAVVKRRLSEKDCEKGFILDGFPRTVRQAEYLDSFLESQNRQLTAAVLIEVPEDEVVQRLLSRLACPKCGRIYNMIFLPPKEDELCDDCGVGLVQRLDDKEETVRHRLKVYREKTQPVIDYYSKKGILKRVDGSQGIDNVVAEVLGILGLSDK

SEQ ID NO: 1731 - DNA, 693 bp, synthetic construct
  misc_feature 1..693: note = variant of adenylate kinase from Thermotoga neapolitana
  source 1..693: mol_type = other DNA
atgcaccatcatcaccatcacgggggctccggcatgggggcatatctggtgttcttaggtccgccgggcgcgggaaaaggtacccaaggccgtattatttcggcaaagactggcatcccgcatattagcacgggcgatatcctgcgtgacatcgtcgctaagcaaaacgatgaagttgcctcgagcattaaagagatcatggagaaaggtgaactcgttccagatgaactgggtaacgcggtcgtaaaacgccgcctgtcggagaaagactgcgaaaaaggctttattttggatggtttcccgcgtaccgtgcgccaagcggaatatctggatagttttcttgaaagccagaatcgccagttgacagccgccgtgctgattgaggtccccgaagatgaagttgttcagcgtctgctgtctcgcctgatttgtccgaaatgcgggcgtatctacaacatgatttttctgccaccaaaagaagacgagctgtgtgacgattgcggtgtcggcttagtacagcgtttagatgataaggaagaaacggtccgtcaccgcctgaaagtctaccgtgagaagacccagccggtcattgactattatagtaagaaaggtattctcaaacgcgtagatgggatccaaggaatcgacaacgttgtggcagaagtcctggggattctgggtgggagcgataag

SEQ ID NO: 1732 - protein, 231 aa, synthetic construct
  REGION 1..231: note = variant of adenylate kinase from Thermotoga neapolitana
MHHHHHHGGSGMGAYLVFLGPPGAGKGTQGRIISAKTGIPHISTGDILRDIVAKQNDEVASSIKEIMEKGELVPDELGNAVVKRRLSEKDCEKGFILDGFPRTVRQAEYLDSFLESQNRQLTAAVLIEVPEDEVVQRLLSRLICPKCGRIYNMIFLPPKEDELCDDCGVGLVQRLDDKEETVRHRLKVYREKTQPVIDYYSKKGILKRVDGIQGIDNVVAEVLGILGGSDK

SEQ ID NO: 1733 - DNA, 693 bp, synthetic construct
  misc_feature 1..693: note = variant of adenylate kinase from Thermotoga neapolitana
  source 1..693: mol_type = other DNA
atgcaccatcatcaccatcacgggggctccggcatgggggcatatctggtgttcttaggtccgccgggcgcgggaaaaggtacccaaggccgtattatttcggcaaagactggcatcccgcatattagcacgggcgatatcctgcgtgacatcgtcgctaagcaaaacgatgaagttgcctcgagcattaaagagatcatggagaaaggtgaactcgttccagatgaactgggtccagcgagtgtaaaacgccgcctgtcggagaaagactgcgaaaaaggctttattttggatggtttcccgcgtaccgtgcgccaagcggaatatctggatagttttcttgaaagccagaatcgccagttgacagccgccgtgctgattgaggtccccgaagatgaagttgttcagcgtctgctgtctcgcctgatctgtccgaaatgcgggcgtatctacaacatgatttttctgccaccaaaagaagacgagctgtgtgacgattgcggtgtcggcttagtacagcgtttagatgataaggaagaaacggtccgtcaccgcctgaaagtctaccgtgagaagacccagccggtcattgactattatagtaagaaaggtattctcaaacgcgtagatgggtcgcaaggaatcgacaacgttgtggcagaagtcctggggattctgggttggagcgataag

SEQ ID NO: 1734 - protein, 231 aa, synthetic construct
  REGION 1..231: note = variant of adenylate kinase from Thermotoga neapolitana
MHHHHHHGGSGMGAYLVFLGPPGAGKGTQGRIISAKTGIPHISTGDILRDIVAKQNDEVASSIKEIMEKGELVPDELGPASVKRRLSEKDCEKGFILDGFPRTVRQAEYLDSFLESQNRQLTAAVLIEVPEDEVVQRLLSRLICPKCGRIYNMIFLPPKEDELCDDCGVGLVQRLDDKEETVRHRLKVYREKTQPVIDYYSKKGILKRVDGSQGIDNVVAEVLGILGWSDK

SEQ ID NO: 1735 - DNA, 693 bp, synthetic construct
  misc_feature 1..693: note = variant of adenylate kinase from Thermotoga neapolitana
  source 1..693: mol_type = other DNA
atgcaccatcatcaccatcacgggggctccggcatgggggcatatctggtgttcttaggtccgccgggcgcgggaaaaggtacccaaggccgtattatttcggcaaagactggcatcccgcatattagcacgggcgatatcctgcgtgacatcgtcgctaagcaaaacgatgaagttgcctcgagcattaaagagatcatggagaaaggtgaactcgttccagatgaactgggtaacgcggtcgtaaaacgccgcctgtcggagaaagactgcgaaaaaggctttattttggatggtttcccgcgtaccgtgcgccaagcggaatatctggatagttttcttgaaagccagaatcgccagttgacagccgccgtgctgattgaggtccccgaagatttcgttgttcagcgtctgctgtctcgcctgatctgtccgaaatgcgggcgtatctacaacatgatttttctgccaccaaaagaagacgagctgtgtgacgattgcggtgtcggcttagtacagcgtttagatgataaggaagaaacggtccgtcaccgcctgaaagtctaccgtgagaagacccagccggtcattgactattatagtaagaaaggtattctcaaacgcgtagatgggtcgcaaggaatcgacaacgttgtggcagaagtcctggggattctgggtctgagcgataag

SEQ ID NO: 1736 - protein, 231 aa, synthetic construct
  REGION 1..231: note = variant of adenylate kinase from Thermotoga neapolitana
MHHHHHHGGSGMGAYLVFLGPPGAGKGTQGRIISAKTGIPHISTGDILRDIVAKQNDEVASSIKEIMEKGELVPDELGNAVVKRRLSEKDCEKGFILDGFPRTVRQAEYLDSFLESQNRQLTAAVLIEVPEDFVVQRLLSRLICPKCGRIYNMIFLPPKEDELCDDCGVGLVQRLDDKEETVRHRLKVYREKTQPVIDYYSKKGILKRVDGSQGIDNVVAEVLGILGLSDK

SEQ ID NO: 1737 - DNA, 693 bp, synthetic construct
  misc_feature 1..693: note = variant of adenylate kinase from Thermotoga neapolitana
  source 1..693: mol_type = other DNA
atgcaccatcatcaccatcacgggggctccggcatgggggcatatctggtgttcttaggtccgccgggcgcgggaaaaggtacccaaggccgtattatttcggcaaagactggcatcccgcatattagcacgggcgatatcctgcgtgacatcgtcgctaagcaaaacgatgaagttgcctcgagcattaaagagatcatggagaaaggtgaactcgttccagatgaactgggtaacgcggtcgtaaaacgccgcctgtcggagaaagactgcgaaaaaggctttattttggatggtttcccgcgtaccgtgcgccaagcggaatatctggatagttttcttgaaagccagaatcgccagttgacagccgccgtgctgattgaggtccccgaagatttcgttgttcagcgtctgctgtctcgcctgatctgtccgaaatgcgggcgtatctacaacatgatttttctgccaccaaaagaagacgagctgtgtgacgattgcggtgtcggcttagtacagcgtttagatgataaggaagaaacggtccgtcaccgcctgaaagtctaccgtgagaagacccagccggtcattgactattatagtaagaaaggtattctcaaacgcgtagatgggatgcaaggaatcgacaacgttgtggcagaagtcctggggattctgggttggagcgataag

SEQ ID NO: 1738 - protein, 231 aa, synthetic construct
  REGION 1..231: note = variant of adenylate kinase from Thermotoga neapolitana
MHHHHHHGGSGMGAYLVFLGPPGAGKGTQGRIISAKTGIPHISTGDILRDIVAKQNDEVASSIKEIMEKGELVPDELGNAVVKRRLSEKDCEKGFILDGFPRTVRQAEYLDSFLESQNRQLTAAVLIEVPEDFVVQRLLSRLICPKCGRIYNMIFLPPKEDELCDDCGVGLVQRLDDKEETVRHRLKVYREKTQPVIDYYSKKGILKRVDGMQGIDNVVAEVLGILGWSDK

SEQ ID NO: 1739 - DNA, 693 bp, synthetic construct
  misc_feature 1..693: note = variant of adenylate kinase from Thermotoga neapolitana
  source 1..693: mol_type = other DNA
atgcaccatcatcaccatcacgggggctccggcatgggggcatatctggtgttcttaggtccgccgggcgcgggaaaaggtacccaaggccgtattatttcggcaaagactggcatcccgcatattagcacgggcgatatcctgcgtgacatcgtcgctaagcaaaacgatgaagttgcctcgagcattaaagagatcatggagaaaggtgaactcgttccagatgaactgggtaatgcggtagtaaaacgccgcctgtcggagaaagactgcgaaaaaggctttattttggatggtttcccgcgtaccgtgcgccaagcggaatatctggatagttttcttgaaagccagaatcgccagttgacagccgccgtgctgattgaggtccccgaagatgaagttgttctgcgtctgctgtctcgcctgatctgtccgaaatgcgggcgtatctacaacatgatttttctgccaccaaaagaagacgagctgtgtgacgattgcggtgtcggcttagtacagcgtttagatgataaggaagaaacggtccgtcaccgcctgaaagtctaccgtgagaagacccagccggtcattgactattatagtaagaaaggtattctcaaacgcgtagatgggtcgcaaggaatcgaccatgtggtggcagaagtcctggggattctgggttggagcgataag

SEQ ID NO: 1740 - protein, 231 aa, synthetic construct
  REGION 1..231: note = variant of adenylate kinase from Thermotoga neapolitana
MHHHHHHGGSGMGAYLVFLGPPGAGKGTQGRIISAKTGIPHISTGDILRDIVAKQNDEVASSIKEIMEKGELVPDELGNAVVKRRLSEKDCEKGFILDGFPRTVRQAEYLDSFLESQNRQLTAAVLIEVPEDEVVLRLLSRLICPKCGRIYNMIFLPPKEDELCDDCGVGLVQRLDDKEETVRHRLKVYREKTQPVIDYYSKKGILKRVDGSQGIDHVVAEVLGILGWSDK

SEQ ID NO: 1741 - DNA, 693 bp, synthetic construct
  misc_feature 1..693: note = variant of adenylate kinase from Thermotoga neapolitana
  source 1..693: mol_type = other DNA
atgcaccatcatcaccatcacgggggctccggcatgggggcatatctggtgttcttaggtccgccgggcgcgggaaaaggtacccaaggccgtattatttcggcaaagactggcatcccgcatattagcacgggcgatatcctgcgtgacatcgtcgctaagcaaaacgatgaagttgcctcgagcattaaagagatcatggagaaaggtgaactcgttccagatgaactgggtaatgcggtaccgaaacgccgcctgtcggagaaagactgcgaaaaaggctttattttggatggtttcccgcgtaccgtgcgccaagcggaatatctggatagttttcttgaaagccagaatcgccagttgacagccgccgtgctgattgaggtccccgaagatgaagttgttctgcgtctgctgtctcgcctgatctgtccgaaatgcgggcgtatttacaacatgatttttctgccaccaaaagaagacgagctgtgtgacgattgcggtgtcggcttagtacagcgtttagatgataaggaagaaacggtccgtcaccgcctgaaagtctaccgtgagaagacccagccggtcattgactattatagtaagaaaggtattctcaaacgcgtagatgggtcgcaaggaatcgacaacgttgtggcagaagtcctggggattctgggttggagcgataag

SEQ ID NO: 1742 - protein, 231 aa, synthetic construct
  REGION 1..231: note = variant of adenylate kinase from Thermotoga neapolitana
MHHHHHHGGSGMGAYLVFLGPPGAGKGTQGRIISAKTGIPHISTGDILRDIVAKQNDEVASSIKEIMEKGELVPDELGNAVPKRRLSEKDCEKGFILDGFPRTVRQAEYLDSFLESQNRQLTAAVLIEVPEDEVVLRLLSRLICPKCGRIYNMIFLPPKEDELCDDCGVGLVQRLDDKEETVRHRLKVYREKTQPVIDYYSKKGILKRVDGSQGIDNVVAEVLGILGWSDK

SEQ ID NO: 1743 - DNA, 693 bp, synthetic construct
  misc_feature 1..693: note = variant of adenylate kinase from Thermotoga neapolitana
  source 1..693: mol_type = other DNA
atgcaccatcatcaccatcacgggggctccggcatgggggcatatctggtgttcttaggtccgccgggcgcgggaaaaggtacccaaggccgtattatttcggcaaagactggcatcccgcatattagcacgggcgatatcctgcgtgacatcgtcgctaagcaaaacgatgaagttgcctcgagcattaaagagatcatggagaaaggtgaactcgttccagatgaactgggtaatgcggtagtaaaacgccgcctgtcggagaaagactgcgaaaaaggctttattttggatggtttcccgcgtaccgtgcgccaagcggaatatctggatagttttcttgaaagccagaatcgccagttgacagccgccgtgctgcctgaggtccccgaagatgaagttgttcagcgtctgctgtctcgcctgatctgtccgaaatgcgggcgtatctacaacatgatttttctgccaccaaaagaagacgagctgtgtgacgattgcggtgtcggcttagtacagcgtttagatgataaggaagaaacggtccgtcaccgcctgaaagtctaccgtgagaagacccagccggtcattgactattatagtaagaaaggtattctcaaacgcgtagatgggtcgcaaggaatcgacaacgttgtggcagaagtcctggggattctgggttggagcgataag

SEQ ID NO: 1744 - protein, 231 aa, synthetic construct
  REGION 1..231: note = variant of adenylate kinase from Thermotoga neapolitana
MHHHHHHGGSGMGAYLVFLGPPGAGKGTQGRIISAKTGIPHISTGDILRDIVAKQNDEVASSIKEIMEKGELVPDELGNAVVKRRLSEKDCEKGFILDGFPRTVRQAEYLDSFLESQNRQLTAAVLPEVPEDEVVQRLLSRLICPKCGRIYNMIFLPPKEDELCDDCGVGLVQRLDDKEETVRHRLKVYREKTQPVIDYYSKKGILKRVDGSQGIDNVVAEVLGILGWSDK

SEQ ID NO: 1745 - DNA, 693 bp, synthetic construct
  misc_feature 1..693: note = variant of adenylate kinase from Thermotoga neapolitana
  source 1..693: mol_type = other DNA
atgcaccatcatcaccatcacgggggctccggcatgggggcatatctggtgttcttaggtccgccgggcgcgggaaaaggtacccaaggccgtattatttcggcaaagactggcatcccgcatattagcacgggcgatatcctgcgtgacatcgtcgctaagcaaaacgatgaagttgcctcgagcattaaagagatcatggagaaaggtgaactcgttccagatgaactgggtaatgcggtagtaaaacgccgcctgtcggagaaagactgcgaaaaaggctttattttggatggtttcccgcgtaccgtgcgccaagcggaatatctggatagttttcttgaaagccagaatcgccagttgacagccgccgtgctgattgaggtccccgaagatgaagttgttcagcgtctgctgtctcgcctgatctgtccgaaatgcgggcgtatctacaacatgatttttctgccaccaaaagaagacgagctgtgtgacgattgcggtgtcggcttagtacagcgtttagatgataaggaagaaacggtccgtcaccgcctgaaagtctaccgtgagaagacccagccggtcattgactattatagtaagaaaggtattctcaaacgcgtagatgggtcgcaaggaatcgacgaggttgtggcagaagtcctggggattctgggttggagcgataag

SEQ ID NO: 1746 - protein, 231 aa, synthetic construct
  REGION 1..231: note = variant of adenylate kinase from Thermotoga neapolitana
MHHHHHHGGSGMGAYLVFLGPPGAGKGTQGRIISAKTGIPHISTGDILRDIVAKQNDEVASSIKEIMEKGELVPDELGNAVVKRRLSEKDCEKGFILDGFPRTVRQAEYLDSFLESQNRQLTAAVLIEVPEDEVVQRLLSRLICPKCGRIYNMIFLPPKEDELCDDCGVGLVQRLDDKEETVRHRLKVYREKTQPVIDYYSKKGILKRVDGSQGIDEVVAEVLGILGWSDK

SEQ ID NO: 1747 - DNA, 693 bp, synthetic construct
  misc_feature 1..693: note = variant of adenylate kinase from Thermotoga neapolitana
  source 1..693: mol_type = other DNA
atgcaccatcatcaccatcacgggggctccggcatgggggcatatctggtgttcttaggtccgccgggcgcgggaaaaggtacccaaggccgtattatttcggcaaagactggcatcccgcatattagcacgggcgatatcctgcgtgacatcgtcgctaagcaaaacgatgaagttgcctcgagcattaaagagatcatggagaaaggtgaactcgttccagatgaactgggtaatgcggtagtaaaacgccgcctgtcggagaaagactgcgaaaaaggctttattttggatggtttcccgcgtaccgtgcgccaagcggaatatctggatagttttcttgaaagccagaatcgccagttgacagccgccgtgctgattgaggtccccgaagatgaagttgttcagcgtctgctgtctcgcctgatctgtccgaaatgcgggcgtatctacaacatgatttttctgccaccaaaagaagacgagctgtgtgacgattgcggtgtcggcttagtacagcgtttagatgataaggaagaaacggtccgtcaccgcctgaaagtctaccgtgagaagacccagccggtcattgactattatagtaagaaaggtattctcaaacgcgtagatgggtcgcaaggaatccataacgttgtggcagaagtcctggggattctgggttggagcgataag

SEQ ID NO: 1748 - protein, 231 aa, synthetic construct
  REGION 1..231: note = variant of adenylate kinase from Thermotoga neapolitana
MHHHHHHGGSGMGAYLVFLGPPGAGKGTQGRIISAKTGIPHISTGDILRDIVAKQNDEVASSIKEIMEKGELVPDELGNAVVKRRLSEKDCEKGFILDGFPRTVRQAEYLDSFLESQNRQLTAAVLIEVPEDEVVQRLLSRLICPKCGRIYNMIFLPPKEDELCDDCGVGLVQRLDDKEETVRHRLKVYREKTQPVIDYYSKKGILKRVDGSQGIHNVVAEVLGILGWSDK

SEQ ID NO: 1749 - DNA, 693 bp, synthetic construct
  misc_feature 1..693: note = variant of adenylate kinase from Thermotoga neapolitana
  source 1..693: mol_type = other DNA
atgcaccatcatcaccatcacgggggctccggcatgggggcatatctggtgttcttaggtccgccgggcgcgggaaaaggtacccaaggccgtattatttcggcaaagactggcatcccgcatattagcacgggcgatatcctgcgtgacatcgtcgctaagcaaaacgatgaagttgcctcgagcattaaagagatcatggagaaaggtgaactcgttccagatgaactgggtaatgcggtagtaaaacgccgcctgtcggagaaagactgcgaaaaaggctttattttggatggtttcccgcgtaccgtgcgccaagcggaatatctggatagttttcttgaaagccagaatcgccagttgacagccgccgtgctgattgaggtccccgaagatgaagttgttcagcgtctgctgtctcgcctgatctgtccgaaatgcgggcgtatctacaacatgatttttctgccaccaaaagaagacgagctgtgtgacgattgcggtgtcggcttagtacagcgtttagatgataaggaagaaacggtccgtcaccgcctgaaagtctaccgtgagaagacccagccggtcattgactattatagtaagaaaggtattctcaaacgcgtagatgggtcgcaaggaccggacaacgttgtggcagaagtcctggggattctgggttggagcgataag

SEQ ID NO: 1750 - protein, 231 aa, synthetic construct
  REGION 1..231: note = variant of adenylate kinase from Thermotoga neapolitana
MHHHHHHGGSGMGAYLVFLGPPGAGKGTQGRIISAKTGIPHISTGDILRDIVAKQNDEVASSIKEIMEKGELVPDELGNAVVKRRLSEKDCEKGFILDGFPRTVRQAEYLDSFLESQNRQLTAAVLIEVPEDEVVQRLLSRLICPKCGRIYNMIFLPPKEDELCDDCGVGLVQRLDDKEETVRHRLKVYREKTQPVIDYYSKKGILKRVDGSQGPDNVVAEVLGILGWSDK

SEQ ID NO: 1751 - DNA, 693 bp, synthetic construct
  misc_feature 1..693: note = variant of adenylate kinase from Thermotoga neapolitana
  source 1..693: mol_type = other DNA
atgcaccatcatcaccatcacgggggctccggcatgggggcatatctggtgttcttaggtccgccgggcgcgggaaaaggtacccaaggccgtattatttcggcaaagactggcatcccgcatattagcacgggcgatatcctgcgtgacatcgtcgctaagcaaaacgatgaagttgcctcgagcattaaagagatcatggagaaaggtgaactcgttccagatgaactgggtaatgcggtagtaaaacgccgcctgtcggagaaagactgcgaaaaaggctttattttggatggtttcccgcgtaccgtgcgccaagcggaatatctggatagttttcttgaaagccagaatcgccagttgacagccgccgtgctgattgaggtccccgaagatgaagttgttcagcgtctgctgtctcgcctgccgtgtccgaaatgcgggcgtatctacaacatgatttttctgccaccaaaagaagacgagctgtgtgacgattgcggtgtcggcttagtacagcgtttagatgataaggaagaaacggtccgtcaccgcctgaaagtctaccgtgagaagacccagccggtcattgactattatagtaagaaaggtattctcaaacgcgtagatgggtcgcaaggaatcgacaacgttgtggcagaagtcctggggattctgggttggagcgataag

SEQ ID NO: 1752 - protein, 231 aa, synthetic construct
  REGION 1..231: note = variant of adenylate kinase from Thermotoga neapolitana
MHHHHHHGGSGMGAYLVFLGPPGAGKGTQGRIISAKTGIPHISTGDILRDIVAKQNDEVASSIKEIMEKGELVPDELGNAVVKRRLSEKDCEKGFILDGFPRTVRQAEYLDSFLESQNRQLTAAVLIEVPEDEVVQRLLSRLPCPKCGRIYNMIFLPPKEDELCDDCGVGLVQRLDDKEETVRHRLKVYREKTQPVIDYYSKKGILKRVDGSQGIDNVVAEVLGILGWSDK

SEQ ID NO: 1753 - DNA, 693 bp, synthetic construct
  misc_feature 1..693: note = variant of adenylate kinase from Thermotoga neapolitana
  source 1..693: mol_type = other DNA
atgcaccatcatcaccatcacgggggctccggcatgggggcatatctggtgttcttaggtccgccgggcgcgggaaaaggtacccaaggccgtattatttcggcaaagactggcatcccgcatattagcacgggcgatatcctgcgtgacatcgtcgctaagcaaaacgatgaagttgcctcgagcattaaagagatcatggagaaaggtgaactcgttccagatgaactgggtaatgcggtagtaaaacgccgcctgtcggagaaagactgcgaaaaaggctttattttggatggtttcccgcgtaccgtgcgccaagcggaatatctggatagttttcttgaaagccagaatcgccagttgacagccgccgtgctgattgaggtccccgaagatgaagttgttcagcgtctgctgtctcgcctgatctgtccgaaatgcgggcgtatccggaacatgatttttctgccaccaaaagaagacgagctgtgtgacgattgcggtgtcggcttagtacagcgtttagatgataaggaagaaacggtccgtcaccgcctgaaagtctaccgtgagaagacccagccggtcattgactattatagtaagaaaggtattctcaaacgcgtagatgggtcgcaaggaatcgacaacgttgtggcagaagtcctggggattctgggttggagcgataag

SEQ ID NO: 1754 - protein, 231 aa, synthetic construct
  REGION 1..231: note = variant of adenylate kinase from Thermotoga neapolitana
MHHHHHHGGSGMGAYLVFLGPPGAGKGTQGRIISAKTGIPHISTGDILRDIVAKQNDEVASSIKEIMEKGELVPDELGNAVVKRRLSEKDCEKGFILDGFPRTVRQAEYLDSFLESQNRQLTAAVLIEVPEDEVVQRLLSRLICPKCGRIRNMIFLPPKEDELCDDCGVGLVQRLDDKEETVRHRLKVYREKTQPVIDYYSKKGILKRVDGSQGIDNVVAEVLGILGWSDK

SEQ ID NO: 1755 - DNA, 693 bp, synthetic construct
  misc_feature 1..693: note = variant of adenylate kinase from Thermotoga neapolitana
  source 1..693: mol_type = other DNA
atgcaccatcatcaccatcacgggggctccggcatgggggcatatctggtgttcttaggtccgtctggcgcgggaaaaggtacccaaggccgtattatttcggcaaagactggcatcccgcatattagcacgggcgatatcctgcgtgacatcgtcgctaagcaaaacgatgaagttgcctcgagcattaaagagatcatggagaaaggtgaactcgttccagatgaactgggtaatgcggtagtaaaacgccgcctgtcggagaaagactgcgaaaaaggctttattttggatggtttcccgcgtaccgtgcgccaagcggaatatctggatagttttcttgaaagccagaatcgccagttgacagccgccgtgctgattgaggtccccgaagatgaagttgttcagcgtctgctgtctcgcctgatctgtccgaaatgcgggcgtatctacaacatgatttttctgccaccaaaagaagacgagctgtgtgacgattgcggtgtcggcttagtacagcgtttagatgataaggaagaaacggtccgtcaccgcctgaaagtctaccgtgagaagacccagccggtcattgactattatagtaagaaaggtattctcaaacgcgtagatgggtcgcaaggaatcgacaacgttgtggcagaagtcctggggattctgggttggagcgataag

SEQ ID NO: 1756 - protein, 231 aa, synthetic construct
  REGION 1..231: note = variant of adenylate kinase from Thermotoga neapolitana
MHHHHHHGGSGMGAYLVFLGPSGAGKGTQGRIISAKTGIPHISTGDILRDIVAKQNDEVASSIKEIMEKGELVPDELGNAVVKRRLSEKDCEKGFILDGFPRTVRQAEYLDSFLESQNRQLTAAVLIEVPEDEVVQRLLSRLICPKCGRIYNMIFLPPKEDELCDDCGVGLVQRLDDKEETVRHRLKVYREKTQPVIDYYSKKGILKRVDGSQGIDNVVAEVLGILGWSDK

SEQ ID NO: 1757 - DNA, 693 bp, synthetic construct
  misc_feature 1..693: note = variant of adenylate kinase from Thermotoga neapolitana
  source 1..693: mol_type = other DNA
atgcaccatcatcaccatcacgggggctccggcatgggggcatatctggtgttcttaggtccgccgggcgcgggaaaaggtacccaaggccgtattatttcggcaaagactggcatcccgcatattagcacgggcgatatcctgcgtgacatcgtcgctaagcaaaacgatgaagttgcctcgagcattaaagagatcatggagaaaggtgaactcgttccagatgaactgggtaatgcggtagtaaaacgccgcctgtcggagaaagactgcgaaaaaggctttattttggatggtttcccgcgtaccgtgcgccaagcggaatatctggatagttttcttgaaagccagaatcgccagttgacagccgccgtgctgattgaggtccccgaagatgaagttgttcagcgtctgctgtctcgcctgatctgtccgaaatgcgggcgtatctacaacatgatttttctgccaccaaaagaagacgagctgtgtgacgattgcggtgtcggcttagtacagcgtttagatgataaggaagaaacggtccgtcaccgcctgaaagtctaccgtgagaagacccagccggtcattgactattatagtaagaaaggtattctcaaacgcgtagatgggtcgcaaggaatcccgaacgttgtggcagaagtcctggggattctgggttggagcgataag

SEQ ID NO: 1758 - protein, 231 aa, synthetic construct
  REGION 1..231: note = variant of adenylate kinase from Thermotoga neapolitana
MHHHHHHGGSGMGAYLVFLGPPGAGKGTQGRIISAKTGIPHISTGDILRDIVAKQNDEVASSIKEIMEKGELVPDELGNAVVKRRLSEKDCEKGFILDGFPRTVRQAEYLDSFLESQNRQLTAAVLIEVPEDEVVQRLLSRLICPKCGRIYNMIFLPPKEDELCDDCGVGLVQRLDDKEETVRHRLKVYREKTQPVIDYYSKKGILKRVDGSQGIPNVVAEVLGILGWSDK

SEQ ID NO: 1759 - DNA, 693 bp, synthetic construct
  misc_feature 1..693: note = variant of adenylate kinase from Thermotoga neapolitana
  source 1..693: mol_type = other DNA
atgcaccatcatcaccatcacgggggctccggcatgggggcatatctggtgttcttaggtccgccgggcgcgggaaaaggtacccaaggccgtattatttcggcaaagactggcatcccgcatattagcacgggcgatatcctgcgtgacatcgtcgctaagcaaaacgatgaagttgcctcgagcattaaagagatcatggagaaaggtgaactcgttccagatgaactgggtaatgcggtagtaaaacgccgcctgtcggagaaagactgcgaaaaaggctttattttggatggtttcccgcgtaccgtgcgccaagcggaatatctggatagttttcttgaaagccagaatcgccagttgacagccgccgtgctgattgaggtccccgaagatgaagttgttcagcgtctgctgtctcgcctgatctgtccgaaatgcgggcgtatctacaacatgatttttctgccaccaaaagaagacgagctgtgtgacgattgcggtgtcggcttagtacagcgtttagatgataaggaagaaacggtccgtcaccgcctgaaagtctaccgtgagaagacccagccggtcattgactattatagtaagaaaggtattctcaaacgcgtagatgggatgcaaggaatcgacaacgttgtggcagaagtcctggggattctgggttggagcgataag

SEQ ID NO: 1760 - protein, 231 aa, synthetic construct
  REGION 1..231: note = variant of adenylate kinase from Thermotoga neapolitana
MHHHHHHGGSGMGAYLVFLGPPGAGKGTQGRIISAKTGIPHISTGDILRDIVAKQNDEVASSIKEIMEKGELVPDELGNAVVKRRLSEKDCEKGFILDGFPRTVRQAEYLDSFLESQNRQLTAAVLIEVPEDEVVQRLLSRLICPKCGRIYNMIFLPPKEDELCDDCGVGLVQRLDDKEETVRHRLKVYREKTQPVIDYYSKKGILKRVDGMQGIDNVVAEVLGILGWSDK

SEQ ID NO: 1761 - DNA, 693 bp, synthetic construct
  misc_feature 1..693: note = variant of adenylate kinase from Thermotoga neapolitana
  source 1..693: mol_type = other DNA
atgcaccatcatcaccatcacgggggctccggcatgggggcatatctggtgttcttaggtccgccgggcgcgggaaaaggtacccaaggccgtattatttcggcaaagactggcatcccgcatattagcacgggcgatatcctgcgtgacatcgtcgctaagcaaaacgatgaagttgcctcgagcattaaagagatcatggagaaaggtgaactcgttccagatgaactgggtaatgcggtagtaaaacgccgcctgtcggagaaagactgcgaaaaaggctttattttggatggtttcccgcgtaccgtgcgccaagcggaatatctggatagttttcttgaaagccagaatcgccagttgacagccgccgtgctgattgaggtccccgaagatgaagttgttcagcgtctgctgtctcgcctgatctgtccgaaatgcgggcgtatcgcgaacatgatttttctgccaccaaaagaagacgagctgtgtgacgattgcggtgtcggcttagtacagcgtttagatgataaggaagaaacggtccgtcaccgcctgaaagtctaccgtgagaagacccagccggtcattgactattatagtaagaaaggtattctcaaacgcgtagatgggtcgcaaggaatcgacaacgttgtggcagaagtcctggggattctgggttggagcgataag

SEQ ID NO: 1762 - protein, 231 aa, synthetic construct
  REGION 1..231: note = variant of adenylate kinase from Thermotoga neapolitana
MHHHHHHGGSGMGAYLVFLGPPGAGKGTQGRIISAKTGIPHISTGDILRDIVAKQNDEVASSIKEIMEKGELVPDELGNAVVKRRLSEKDCEKGFILDGFPRTVRQAEYLDSFLESQNRQLTAAVLIEVPEDEVVQRLLSRLICPKCGRIANMIFLPPKEDELCDDCGVGLVQRLDDKEETVRHRLKVYREKTQPVIDYYSKKGILKRVDGSQGIDNVVAEVLGILGWSDK

SEQ ID NO: 1763 - DNA, 693 bp, synthetic construct
  misc_feature 1..693: note = variant of adenylate kinase from Thermotoga neapolitana
  source 1..693: mol_type = other DNA
atgcaccatcatcaccatcacgggggctccggcatgggggcatatctggtgttcttaggtccgccgggcgcgggaaaaggtacccaaggccgtattatttcggcaaagactggcatcccgcatattagcacgggcgatatcctgcgtgacatcgtcgctaagcaaaacgatgaagttgcctcgagcattaaagagatcatggagaaaggtgaactcgttccagatgaactgggtaatgcggtagtaaaacgccgcctgtcggagaaagactgcgaaaaaggctttattttggatggtttcccgcgtaccgtgcgccaagcggaatatctggatagttttcttgaaagccagaatcgccagttgacagccgccgtgctgattgaggtccccgaagatgaagttgttcagcgtctgctgtctcgcctgatctgtccgaaatgcgggcgtatctacaacatgatttttctgccaccaaaagaagacgagctgtgtgacgattgcggtgtcggcttagtacagcgtttagatgataaggaagaaacggtccgtcaccgcctgaaagtctaccgtgagaagacccagccggtcattgactattatagtaagaaaggtattctcaaacgcgtagatgggtcgcaaggaatcgacaacgttgcggcagaagtcctggggattctgggttggagcgataag

SEQ ID NO: 1764 - protein, 231 aa, synthetic construct
  REGION 1..231: note = variant of adenylate kinase from Thermotoga neapolitana
MHHHHHHGGSGMGAYLVFLGPPGAGKGTQGRIISAKTGIPHISTGDILRDIVAKQNDEVASSIKEIMEKGELVPDELGNAVVKRRLSEKDCEKGFILDGFPRTVRQAEYLDSFLESQNRQLTAAVLIEVPEDEVVQRLLSRLICPKCGRIYNMIFLPPKEDELCDDCGVGLVQRLDDKEETVRHRLKVYREKTQPVIDYYSKKGILKRVDGSQGIDNVAAEVLGILGWSDK

SEQ ID NO: 1765 - DNA, 693 bp, synthetic construct
  misc_feature 1..693: note = variant of adenylate kinase from Thermotoga neapolitana
  source 1..693: mol_type = other DNA
atgcaccatcatcaccatcacgggggctccggcatgggggcatatctggtgttcttaggtccgccgggcgcgggaaaaggtacccaaggccgtattatttcggcaaagactggcatcccgcatattagcacgggcgatatcctgcgtgacatcgtcgctaagcaaaacgatgaagttgcctcgagcattaaagagatcatggagaaaggtgaactcgttccagatgaactgggtaatgcggtagtaaaacgccgcctgtcggagaaagactgcgaaaaaggctttattttggatggtttcccgcgtaccgtgcgccaagcggaatatctggatagttttcttgaaagccagaatcgccagttgacagccgccgtgctgattgaggtccccgaagatgaagttgttcagcgtctgctgtctcgcctgatctgtccgaaatgcgggcgtatctacaacatgatttttctgccaccaaaagaagacgagctgtgtgacgattgcggtgtcggcttagtacagcgtttagatgataaggaagaaacggtccgtcaccgcctgaaagtctaccgtgagaagacccagccggtcattgactattatagtaagaaaggtattctcaaacgcgtagatgggtcgctgggaatcgacaacgttgtggcagaagtcctggggattctgggttggagcgataag

SEQ ID NO: 1766 - protein, 231 aa, synthetic construct
  REGION 1..231: note = variant of adenylate kinase from Thermotoga neapolitana
MHHHHHHGGSGMGAYLVFLGPPGAGKGTQGRIISAKTGIPHISTGDILRDIVAKQNDEVASSIKEIMEKGELVPDELGNAVVKRRLSEKDCEKGFILDGFPRTVRQAEYLDSFLESQNRQLTAAVLIEVPEDEVVQRLLSRLICPKCGRIYNMIFLPPKEDELCDDCGVGLVQRLDDKEETVRHRLKVYREKTQPVIDYYSKKGILKRVDGSLGIDNVVAEVLGILGWSDK

SEQ ID NO: 1767 - DNA, 693 bp, synthetic construct
  misc_feature 1..693: note = variant of adenylate kinase from Thermotoga neapolitana
  source 1..693: mol_type = other DNA
atgcaccatcatcaccatcacgggggctccggcatgggggcatatctggtgttcttaggtccgccgggcgcgggaaaaggtacccaaggccgtattatttcggcaaagactggcatcccgcatattagcacgggcgatatcctgcgtgacatcgtcgctaagcaaaacgatgaagttgcctcgagcattaaagagatcatggagaaaggtgaactcgttccagatgaactgggtaatgcggtagtaaaacgccgcctgtcggagaaagactgcgaaaaaggctttattttggatggtttcccgcgtaccgtgcgccaagcggaatatctggatagttttcttgaaagccagaatcgccagttgacagccgccgtgctgattgaggtccccgaagatgaagttgttcagcgtctgctgtctcgcctgatctgtccgaaatgcgggcgtatctacaacatgatttttctgccaccaaaagaagacgagctgtgtgacgattgcggtgtcggcttagtacagcgtttagatgataaggaagaaacggtccgtcaccgcctgaaagtctaccgtgagaagacccagccggtcattgactattatagtaagaaaggtattctcaaacgcgtagatgggtcgcctggaatcgacaacgttgtggcagaagtcctggggattctgggttggagcgataag

SEQ ID NO: 1768 - protein, 231 aa, synthetic construct
  REGION 1..231: note = variant of adenylate kinase from Thermotoga neapolitana
MHHHHHHGGSGMGAYLVFLGPPGAGKGTQGRIISAKTGIPHISTGDILRDIVAKQNDEVASSIKEIMEKGELVPDELGNAVVKRRLSEKDCEKGFILDGFPRTVRQAEYLDSFLESQNRQLTAAVLIEVPEDEVVQRLLSRLICPKCGRIYNMIFLPPKEDELCDDCGVGLVQRLDDKEETVRHRLKVYREKTQPVIDYYSKKGILKRVDGSPGIDNVVAEVLGILGWSDK

SEQ ID NO: 1769 - DNA, 693 bp, synthetic construct
  misc_feature 1..693: note = variant of adenylate kinase from Thermotoga neapolitana
  source 1..693: mol_type = other DNA
atgcaccatcatcaccatcacgggggctccggcatgggggcatatctggtgttcttaggtccgccgggcgcgggaaaaggtacccaaggccgtattatttcggcaaagactggcatcccgcatattagcacgggcgatatcctgcgtgacatcgtcgctaagcaaaacgatgaagttgcctcgagcattaaagagatcatggagaaaggtgaactcgttccagatgaactgggtaatgcggtagtaaaacgccgcctgtcggagaaagactgcgaaaaaggctttattttggatggtttcccgcgtaccgtgcgccaagcggaatatctggatagttttcttgaaagccagaatcgccagttgacagccgccgtgctgtctgaggtccccgaagatgaagttgttcagcgtctgctgtctcgcctgatctgtccgaaatgcgggcgtatctacaacatgatttttctgccaccaaaagaagacgagctgtgtgacgattgcggtgtcggcttagtacagcgtttagatgataaggaagaaacggtccgtcaccgcctgaaagtctaccgtgagaagacccagccggtcattgactattatagtaagaaaggtattctcaaacgcgtagatgggtcgcaaggaatcgacaacgttgtggcagaagtcctggggattctgggttggagcgataag

SEQ ID NO: 1770 - protein, 231 aa, synthetic construct
  REGION 1..231: note = variant of adenylate kinase from Thermotoga neapolitana
MHHHHHHGGSGMGAYLVFLGPPGAGKGTQGRIISAKTGIPHISTGDILRDIVAKQNDEVASSIKEIMEKGELVPDELGNAVVKRRLSEKDCEKGFILDGFPRTVRQAEYLDSFLESQNRQLTAAVLSEVPEDEVVQRLLSRLICPKCGRIYNMIFLPPKEDELCDDCGVGLVQRLDDKEETVRHRLKVYREKTQPVIDYYSKKGILKRVDGSQGIDNVVAEVLGILGWSDK

SEQ ID NO: 1771 - DNA, 693 bp, synthetic construct
  misc_feature 1..693: note = variant of adenylate kinase from Thermotoga neapolitana
  source 1..693: mol_type = other DNA
atgcaccatcatcaccatcacgggggctccggcatgggggcatatctggtgttcttaggtccgccgggcgcgggaaaaggtacccaaggccgtattatttcggcaaagactggcatcccgcatattagcacgggcgatatcctgcgtgacatcgtcgctaagcaaaacgatgaagttgcctcgagcattaaagagatcatggagaaaggtgaactcgttccagatgaactgggtaatgcggtagtaaaacgccgcctgtcggagaaagactgcgaaaaaggctttattttggatggtttcccgcgtaccgtgcgccaagcggaatatctggatagttttcttgaaagccagaatcgccagttgacagccgccgtgctgattgaggtccccgaagatgaagttgttcagcgtctgctgtctcgcctgatctgtccgaaatgcgggcgttgttacaacatgatttttctgccaccaaaagaagacgagctgtgtgacgattgcggtgtcggcttagtacagcgtttagatgataaggaagaaacggtccgtcaccgcctgaaagtctaccgtgagaagacccagccggtcattgactattatagtaagaaaggtattctcaaacgcgtagatgggtcgcaaggaatcgacaacgttgtggcagaagtcctggggattctgggttggagcgataag

SEQ ID NO: 1772 - protein, 231 aa, synthetic construct
  REGION 1..231: note = variant of adenylate kinase from Thermotoga neapolitana
MHHHHHHGGSGMGAYLVFLGPPGAGKGTQGRIISAKTGIPHISTGDILRDIVAKQNDEVASSIKEIMEKGELVPDELGNAVVKRRLSEKDCEKGFILDGFPRTVRQAEYLDSFLESQNRQLTAAVLIEVPEDEVVQRLLSRLICPKCGRCYNMIFLPPKEDELCDDCGVGLVQRLDDKEETVRHRLKVYREKTQPVIDYYSKKGILKRVDGSQGIDNVVAEVLGILGWSDK

SEQ ID NO: 1773 - DNA, 693 bp, synthetic construct
  misc_feature 1..693: note = variant of adenylate kinase from Thermotoga neapolitana
  source 1..693: mol_type = other DNA
atgcaccatcatcaccatcacgggggctccggcatgggggcatatctggtgttcttaggtccgccgggcgcgggaaaaggtacccaaggccgtattatttcggcaaagactggcatcccgcatattagcacgggcgatatcctgcgtgacatcgtcgctaagcaaaacgatgaagttgcctcgagcattaaagagatcatggagaaaggtgaactcgttccagatgaactgggtaatgcggtagtaaaacgccgcctgtcggagaaagactgcgaaaaaggctttattttggatggtttcccgcgtaccgtgcgccaagcggaatatctggatagttttcttgaaagccagaatcgccagttgacagccgccgtgctgattgaggtccccgaagatgaagttgttcagcgtctgctgtctcgcctgatctgtccgaaatgcgggcgtatctacaacatgatttttctgccaccaaaagaagacgagctgtgtgacgattgcggtgtcggcttagtacagcgtttagatgataaggaagaaacggtccgtcaccgcctgaaagtctaccgtgagaagacccagccggtcattgactattatagtaagaaaggtattctcaaacgcgtagatgggtcgcaaggagctgacaacgttgtggcagaagtcctggggattctgggttggagcgataag

SEQ ID NO: 1774 - protein, 231 aa, synthetic construct
  REGION 1..231: note = variant of adenylate kinase from Thermotoga neapolitana
MHHHHHHGGSGMGAYLVFLGPPGAGKGTQGRIISAKTGIPHISTGDILRDIVAKQNDEVASSIKEIMEKGELVPDELGNAVVKRRLSEKDCEKGFILDGFPRTVRQAEYLDSFLESQNRQLTAAVLIEVPEDEVVQRLLSRLICPKCGRIYNMIFLPPKEDELCDDCGVGLVQRLDDKEETVRHRLKVYREKTQPVIDYYSKKGILKRVDGSQGADNVVAEVLGILGWSDK

SEQ ID NO: 1775 - DNA, 693 bp, synthetic construct
  misc_feature 1..693: note = variant of adenylate kinase from Thermotoga neapolitana
  source 1..693: mol_type = other DNA
atgcaccatcatcaccatcacgggggctccggcatgggggcatatctggtgttcttaggtccgccgggcgcgggaaaaggtacccaaggccgtattatttcggcaaagactggcatcccgcatattagcacgggcgatatcctgcgtgacatcgtcgctaagcaaaacgatgaagttgcctcgagcattaaagagatcatggagaaaggtgaactcgttccagatgaactgggtaatgcggtagtaaaacgccgcctgtcggagaaagactgcgaaaaaggctttattttggatggtttcccgcgtaccgtgcgccaagcggaatatctggatagttttcttgaaagccagaatcgccagttgacagccgccgtgctgattgaggtccccgaagatgaagttgttcagcgtctgctgtctcgcctgatctgtccgaaatgcgggcgtatctacaacatgatttttctgccaccaaaagaagacgagctgtgtgacgattgcggtgtcggcttagtacagcgtttagatgataaggaagaaacggtccgtcaccgcctgaaagtctaccgtgagaagacccagccggtcattgactattatagtaagaaaggtattctccttcgcgtagatgggtcgcaaggaatcgacaacgttgtggcagaagtcctggggattctgggttggagcgataag

SEQ ID NO: 1776 - protein, 231 aa, synthetic construct
  REGION 1..231: note = variant of adenylate kinase from Thermotoga neapolitana
MHHHHHHGGSGMGAYLVFLGPPGAGKGTQGRIISAKTGIPHISTGDILRDIVAKQNDEVASSIKEIMEKGELVPDELGNAVVKRRLSEKDCEKGFILDGFPRTVRQAEYLDSFLESQNRQLTAAVLIEVPEDEVVQRLLSRLICPKCGRIYNMIFLPPKEDELCDDCGVGLVQRLDDKEETVRHRLKVYREKTQPVIDYYSKKGILLRVDGSQGIDNVVAEVLGILGWSDK

SEQ ID NO: 1777 - DNA, 693 bp, synthetic construct
  misc_feature 1..693: note = variant of adenylate kinase from Thermotoga neapolitana
  source 1..693: mol_type = other DNA
atgcaccatcatcaccatcacgggggctccggcatgggggcatatctggtgttcttaggtccgccgggcgcgggaaaaggtacccaaggccgtattatttcggcaaagactggcatcccgcatattagcacgggcgatatcctgcgtgacatcgtcgctaagcaaaacgatgaagttgcctcgagcattaaagagatcatggagaaaggtgaactcgttccagatgaactgggtaatgcggtagtaaaacgccgcctgtcggagaaagactgcgaaaaaggctttattttggatggtttcccgcgtaccgtgcgccaagcggaatatctggatagttttcttgaaagccagaatcgccagttgacagccgccgtgctgattgaggtccccgaagatcaggttgttcagcgtctgctgtctcgcctgatctgtccgaaatgcgggcgtatctacaacatgatttttctgccaccaaaagaagacgagctgtgtgacgattgcggtgtcggcttagtacagcgtttagatgataaggaagaaacggtccgtcaccgcctgaaagtctaccgtgagaagacccagccggtcattgactattatagtaagaaaggtattctcaaacgcgtagatgggtcgcaaggaatcgacaacgttgtggcagaagtcctggggattctgggttggagcgataag

SEQ ID NO: 1778 - protein, 231 aa, synthetic construct
  REGION 1..231: note = variant of adenylate kinase from Thermotoga neapolitana
MHHHHHHGGSGMGAYLVFLGPPGAGKGTQGRIISAKTGIPHISTGDILRDIVAKQNDEVASSIKEIMEKGELVPDELGNAVVKRRLSEKDCEKGFILDGFPRTVRQAEYLDSFLESQNRQLTAAVLIEVPEDQVVQRLLSRLICPKCGRIYNMIFLPPKEDELCDDCGVGLVQRLDDKEETVRHRLKVYREKTQPVIDYYSKKGILKRVDGSQGIDNVVAEVLGILGWSDK

SEQ ID NO: 1779 - DNA, 693 bp, synthetic construct
  misc_feature 1..693: note = variant of adenylate kinase from Thermotoga neapolitana
  source 1..693: mol_type = other DNA
atgcaccatcatcaccatcacgggggctccggcatgggggcatatctggtgttcttaggtccgccgggcgcgggaaaaggtacccaaggccgtattatttcggcaaagactggcatcccgcatattagcacgggcgatatcctgcgtgacatcgtcgctaagcaaaacgatgaagttgcctcgagcattaaagagatcatggagaaaggtgaactcgttccagatgaactgggtaatgcggtagtaaaacgccgcctgtcggagaaagactgcgaaaaaggctttattttggatggtttcccgcgtaccgtgcgccaagcggaatatctggatagttttcttgaaagccagaatcgccagttgacagccgccgtgctgattgaggtccccgaagatgaagttgttcagcgtctgctgtctcgcctgatctgtccgaaatgcgggcgtatctacaacatgatttttctgccaccaaaagaagacgagctgtgtgacgattgcggtgtcggcttagtacagcgtttagatgataaggaagaaacggtccgtcaccgcctgaaagtctaccgtgagaagacccagccggtcattgactattatagtaagaaaggtattctcaaacgcgtagatgggtggcaaggaatcgacaacgttgtggcagaagtcctggggattctgggttggagcgataag

SEQ ID NO: 1780 - protein, 231 aa, synthetic construct
  REGION 1..231: note = variant of adenylate kinase from Thermotoga neapolitana
MHHHHHHGGSGMGAYLVFLGPPGAGKGTQGRIISAKTGIPHISTGDILRDIVAKQNDEVASSIKEIMEKGELVPDELGNAVVKRRLSEKDCEKGFILDGFPRTVRQAEYLDSFLESQNRQLTAAVLIEVPEDEVVQRLLSRLICPKCGRIYNMIFLPPKEDELCDDCGVGLVQRLDDKEETVRHRLKVYREKTQPVIDYYSKKGILKRVDGWQGIDNVVAEVLGILGWSDK

SEQ ID NO: 1781 - DNA, 693 bp, synthetic construct
  misc_feature 1..693: note = variant of adenylate kinase from Thermotoga neapolitana
  source 1..693: mol_type = other DNA
atgcaccatcatcaccatcacgggggctccggcatgggggcatatctggtgttcttaggtccgccgggcgcgggaaaaggtacccaaggccgtattatttcggcaaagactggcatcccgcatattagcacgggcgatatcctgcgtgacatcgtcgctaagcaaaacgatgaagttgcctcgagcattaaagagatcatggagaaaggtgaactcgttccagatgaactgggtaatgcggtagtaaaacgccgcctgtcggagaaagactgcgaaaaaggctttattttggatggtttcccgcgtaccgtgcgccaagcggaatatctggatagttttcttgaaagccagaatcgccagttgacagccgccgtgctgattgaggtccccgaagatgaagttgttcagcgtctgctgtctcgcctgatctgtccgaaatgcgggcgtatctacaacatgatttttctgccaccaaaagaagacgagctgtgtgacgattgcggtgtcggcttagtacagcgtttagatgataaggaagaaacggtccgtcaccgcctgaaagtctaccgtgagaagacccagccggtcattgactattatagtaagaaaggtattctcaaacgcgtagatgggtcgcaaggaatcgacaacgttggtgcagaagtcctggggattctgggttggagcgataag

SEQ ID NO: 1782 - protein, 231 aa, synthetic construct
  REGION 1..231: note = variant of adenylate kinase from Thermotoga neapolitana
MHHHHHHGGSGMGAYLVFLGPPGAGKGTQGRIISAKTGIPHISTGDILRDIVAKQNDEVASSIKEIMEKGELVPDELGNAVVKRRLSEKDCEKGFILDGFPRTVRQAEYLDSFLESQNRQLTAAVLIEVPEDEVVQRLLSRLICPKCGRIYNMIFLPPKEDELCDDCGVGLVQRLDDKEETVRHRLKVYREKTQPVIDYYSKKGILKRVDGSQGIDNVGAEVLGILGWSDK

SEQ ID NO: 1783 - DNA, 693 bp, synthetic construct
  misc_feature 1..693: note = variant of adenylate kinase from Thermotoga neapolitana
  source 1..693: mol_type = other DNA
atgcaccatcatcaccatcacgggggctccggcatgggggcatatctggtgttcttaggtccgccgggcgcgggaaaaggtacccaaggccgtattatttcggcaaagactggcatcccgcatattagcacgggcgatatcctgcgtgacatcgtcgctaagcaaaacgatgaagttgcctcgagcattaaagagatcatggagaaaggtgaactcgttccagatgaactgggtaatgcggtagtaaaacgccgcctgtcggagaaagactgcgaaaaaggctttattttggatggtttcccgcgtaccgtgcgccaagcggaatatctggatagttttcttgaaagccagaatcgccagttgacagccgccgtgctgattgaggtccccgaagatgaagttgttcagcgtctgctgtctcgcctgatctgtccgaaatgcgggcgtatctacaacatgatttttctgccaccaaaagaagacgagctgtgtgacgattgcggtgtcggcttagtacagcgtttagatgataaggaagaaacggtccgtcaccgcctgaaagtctaccgtgagaagacccagccggtcattgactattatagtaagaaacggattctcaaacgcgtagatgggtcgcaaggaatcgacaacgttgtggcagaagtcctggggattctgggttggagcgataag

SEQ ID NO: 1784 - protein, 231 aa, synthetic construct
  REGION 1..231: note = variant of adenylate kinase from Thermotoga neapolitana
MHHHHHHGGSGMGAYLVFLGPPGAGKGTQGRIISAKTGIPHISTGDILRDIVAKQNDEVASSIKEIMEKGELVPDELGNAVVKRRLSEKDCEKGFILDGFPRTVRQAEYLDSFLESQNRQLTAAVLIEVPEDEVVQRLLSRLICPKCGRIYNMIFLPPKEDELCDDCGVGLVQRLDDKEETVRHRLKVYREKTQPVIDYYSKKRILKRVDGSQGIDNVVAEVLGILGWSDK

SEQ ID NO: 1785 - DNA, 693 bp, synthetic construct
  misc_feature 1..693: note = variant of adenylate kinase from Thermotoga neapolitana
  source 1..693: mol_type = other DNA
atgcaccatcatcaccatcacgggggctccggcatgggggcatatctggtgttcttaggtccgccgggcgcgggaaaaggtacccaaggccgtattatttcggcaaagactggcatcccgcatattagcacgggcgatatcctgcgtgacatcgtcgctaagcaaaacgatgaagttgcctcgagcattaaagagatcatggagaaaggtgaactcgttccagatgaactgggtaatgcggtagtaaaacgccgcctgtcggagaaagactgcgaaaaaggctttattttggatggtttcccgcgtaccgtgcgccaagcggaatatctggatagttttcttgaaagccagaatcgccagttgacagccgccgtgctgattgaggtccccgaagatgaagttgttcagcgtctgctgtctcgcctgatctgtccgaaatgcgggcgtatctacaacatgatttttctgccaccaaaagaagacgagctgtgtgacgattgcggtgtcggcttagtacagcgtttagatgataaggaagaaacggtccgtcaccgcctgaaagtctaccgtgagaagacccagccggtcattgactattatagtaagaaaggtattctcaaacgcgtagatgggtcgcaaggaatcgacaacgtttcggcagaagtcctggggattctgggttggagcgataag

SEQ ID NO: 1786 - protein, 231 aa, synthetic construct
  REGION 1..231: note = variant of adenylate kinase from Thermotoga neapolitana
MHHHHHHGGSGMGAYLVFLGPPGAGKGTQGRIISAKTGIPHISTGDILRDIVAKQNDEVASSIKEIMEKGELVPDELGNAVVKRRLSEKDCEKGFILDGFPRTVRQAEYLDSFLESQNRQLTAAVLIEVPEDEVVQRLLSRLICPKCGRIYNMIFLPPKEDELCDDCGVGLVQRLDDKEETVRHRLKVYREKTQPVIDYYSKKGILKRVDGSQGIDNVSAEVLGILGWSDK

SEQ ID NO: 1787 - DNA, 693 bp, synthetic construct
  misc_feature 1..693: note = variant of adenylate kinase from Thermotoga neapolitana
  source 1..693: mol_type = other DNA
atgcaccatcatcaccatcacgggggctccggcatgggggcatatctggtgttcttaggtccgccgggcgcgggaaaaggtacccaaggccgtattatttcggcaaagactggcatcccgcatattagcacgggcgatatcctgcgtgacatcgtcgctaagcaaaacgatgaagttgcctcgagcattaaagagatcatggagaaaggtgaactcgttccagatgaactgggtaatgcggtagtaaaacgccgcctgtcggagaaagactgcgaaaaaggctttattttggatggtttcccgcgtaccgtgcgccaagcggaatatctggatagttttcttgaaagccagaatcgccagttgacagccgccgtgctgcctgaggtccccgaagatgaagttgttgcacgtctgctgtctcgcctgatctgtccgaaatgcgggcgtagttacaacatgatttttctgccaccaaaagaagacgagctgtgtgacgattgcggtgtcggcttagtacagcgtttagatgataaggaagaaacggtccgtcaccgcctgaaagtctaccgtgagaagacccagccggtcattgactattatagtaagaaaggtattctcaaacgcgtagatgggtcgcaaggaatcgaccctgtcgtggcagaagtcctggggattctgggttggagcgataag

SEQ ID NO: 1788 - protein, 231 aa, synthetic construct
  REGION 1..231: note = variant of adenylate kinase from Thermotoga neapolitana
MHHHHHHGGSGMGAYLVFLGPPGAGKGTQGRIISAKTGIPHISTGDILRDIVAKQNDEVASSIKEIMEKGELVPDELGNAVVKRRLSEKDCEKGFILDGFPRTVRQAEYLDSFLESQNRQLTAAVLPEVPEDEVVARLLSRLICPKCGRSYNMIFLPPKEDELCDDCGVGLVQRLDDKEETVRHRLKVYREKTQPVIDYYSKKGILKRVDGSQGIDPVVAEVLGILGWSDK

SEQ ID NO: 1789 - DNA, 693 bp, synthetic construct
  misc_feature 1..693: note = variant of adenylate kinase from Thermotoga neapolitana
  source 1..693: mol_type = other DNA
atgcaccatcatcaccatcacgggggctccggcatgggggcatatctggtgttcttaggtccgccgggcgcgggaaaaggtacccaaggccgtattatttcggcaaagactggcatcccgcatattagcacgggcgatatcctgcgtgacatcgtcgctaagcaaaacgatgaagttgcctcgagcattaaagagatcatggagaaaggtgaactcgttccagatgaactgggtaatgcggtagtaaaacgccgcctgtcggagaaagactgcgaaaaaggctttattttggatggtttcccgcgtaccgtgcgccaagcggaatatctggatagttttcttgaaagccagaatcgccagttgacagccgccgtgctgattgaggtccccgaagatgaagttgttgcacgtctgctgtctcgcctgagttgtccgaaatgcgggcgtagttacaacatgattgcactgccaccaaaagaagacgagctgtgtgacgattgcggtgtcggcttagtacagcgtttagatgataaggaagaaacggtccgtcaccgcctgaaagtctaccgtgagaagacccagccggtcattgactattatagtaagaaaggtattctcaaacgcgtagatgggtcgcagggaatcgaccctgtgcctgcagaagtcctggggattctgggtcgtagcgataag

SEQ ID NO: 1790 - protein, 231 aa, synthetic construct
  REGION 1..231: note = variant of adenylate kinase from Thermotoga neapolitana
MHHHHHHGGSGMGAYLVFLGPPGAGKGTQGRIISAKTGIPHISTGDILRDIVAKQNDEVASSIKEIMEKGELVPDELGNAVVKRRLSEKDCEKGFILDGFPRTVRQAEYLDSFLESQNRQLTAAVLIEVPEDEVVARLLSRLSCPKCGRSYNMIALPPKEDELCDDCGVGLVQRLDDKEETVRHRLKVYREKTQPVIDYYSKKGILKRVDGSQGIDPVPAEVLGILGRSDK

SEQ ID NO: 1791 - DNA, 693 bp, synthetic construct
  misc_feature 1..693: note = variant of adenylate kinase from Thermotoga neapolitana
  source 1..693: mol_type = other DNA
atgcaccatcatcaccatcacgggggctccggcatgggggcatatctggtgttcttaggtccgccgggcgcgggaaaaggtacccaaggccgtattatttcggcaaagactggcatcccgcatattagcacgggcgatatcctgcgtgacatcgtcgctaagcaaaacgatgaagttgcctcgagcattaaagagatcatggagaaaggtgaactcgttccagatgaactgggtaatgcggtagtaaaacgccgcctgtcggagaaagactgcgaaaaaggctttattttggatggtttcccgcgtaccgtgcgccaagcggaatatctggatagttttcttgaaagccagaatcgccagttgacagccgccgtgctgattgaggtccccgaagatgaagttgttgcacgtctgctgtctcgcctgatctgtccgaaatgcgggcgtagttacaacatgatttttctgccaccaaaagaagacgagctgtgtgacgattgcggtgtcggcttagtacagcgtttagatgataaggaagaaacggtccgtcaccgcctgaaagtctaccgtgagaagacccagccggtcattgactattatagtaagaaaggtattctcaaacgcgtagatgggtcgcaaggaatcgaccctgtgcctgcagaagtcctggggattctgggttggagcgataag

SEQ ID NO: 1792 - protein, 231 aa, synthetic construct
  REGION 1..231: note = variant of adenylate kinase from Thermotoga neapolitana
MHHHHHHGGSGMGAYLVFLGPPGAGKGTQGRIISAKTGIPHISTGDILRDIVAKQNDEVASSIKEIMEKGELVPDELGNAVVKRRLSEKDCEKGFILDGFPRTVRQAEYLDSFLESQNRQLTAAVLIEVPEDEVVARLLSRLICPKCGRSYNMIFLPPKEDELCDDCGVGLVQRLDDKEETVRHRLKVYREKTQPVIDYYSKKGILKRVDGSQGIDPVPAEVLGILGWSDK

SEQ ID NO: 1793 - DNA, 693 bp, synthetic construct
  misc_feature 1..693: note = variant of adenylate kinase from Thermotoga neapolitana
  source 1..693: mol_type = other DNA
atgcaccatcatcaccatcacgggggctccggcatgggggcatatctggtgttcttaggtccgccgggcgcgggaaaaggtacccaaggccgtattatttcggcaaagactggcatcccgcatattagcacgggcgatatcctgcgtgacatcgtcgctaagcaaaacgatgaagttgcctcgagcattaaagagatcatggagaaaggtgaactcgttccagatgaactgggtaatgcggtagtaaaacgccgcctgtcggagaaagactgcgaaaaaggctttattttggatggtttcccgcgtaccgtgcgccaagcggaatatctggatagttttcttgaaagccagaatcgccagttgacagccgccgtgctgcctgaggtccccgaagatgaagttgttgcacgtctgctgtctcgccgtatctgtccgaaatgcgggcgtagttacaacatgatttttctgccaccaaaagaagacgagctgtgtgacgattgcggtgtcggcttagtacagcgtttagatgataaggaagaaacggtccgtcaccgcctgaaagtctaccgtgagaagacccagccggtcattgactattatagtaagaaaggtattctcaaacgcgtagatgggtcgcaaggaatcgaccctgtggtggcagaagtcctggggattctgggttggagcgataag

SEQ ID NO: 1794 - protein, 231 aa, synthetic construct
  REGION 1..231: note = variant of adenylate kinase from Thermotoga neapolitana
MHHHHHHGGSGMGAYLVFLGPPGAGKGTQGRIISAKTGIPHISTGDILRDIVAKQNDEVASSIKEIMEKGELVPDELGNAVVKRRLSEKDCEKGFILDGFPRTVRQAEYLDSFLESQNRQLTAAVLPEVPEDEVVARLLSRRICPKCGRSYNMIFLPPKEDELCDDCGVGLVQRLDDKEETVRHRLKVYREKTQPVIDYYSKKGILKRVDGSQGIDPVVAEVLGILGWSDK

SEQ ID NO: 1795 - DNA, 693 bp, synthetic construct
  misc_feature 1..693: note = variant of adenylate kinase from Thermotoga neapolitana
  source 1..693: mol_type = other DNA
atgcaccatcatcaccatcacgggggctccggcatgggggcatatctggtgttcttaggtccgccgggcgcgggaaaaggtacccaaggccgtattatttcggcaaagactggcatcccgcatattagcacgggcgatatcctgcgtgacatcgtcgctaagcaaaacgatgaagttgcctcgagcattaaagagatcatggaaaaaggtgaactcgttccagatgaactgggtaatgcggtagtaaaacgccgcctgtcggagaaagactgcgaaaaaggctttattttggatggtttcccgcgtaccgtgcgccaagcggaatatctggatagttttcttgaaagccagaatcgccagttgacagccgccgtgctgattgaggtccccgaagatgaagttgttgcacgtctgctgtctcgccgtatctgtccgaaatgcgggcgtagtgccaacatgatttttctgccaccaaaagaagacgagctgtgtgacgattgcggtgtcggcttagtacagcgtttagatgataaggaagaaacggtccgtcaccgcctgaaagtctaccgtgagaagacccagccggtcattgactattatagtaagaaaggtattctcgcacgcgtagatgggtcgcaaggaatcgaccctgccgtggcagaagtcctggggattctgggttggagcgataag

SEQ ID NO: 1796 - protein, 231 aa, synthetic construct
  REGION 1..231: note = variant of adenylate kinase from Thermotoga neapolitana
MHHHHHHGGSGMGAYLVFLGPPGAGKGTQGRIISAKTGIPHISTGDILRDIVAKQNDEVASSIKEIMEKGELVPDELGNAVVKRRLSEKDCEKGFILDGFPRTVRQAEYLDSFLESQNRQLTAAVLIEVPEDEVVARLLSRRICPKCGRSANMIFLPPKEDELCDDCGVGLVQRLDDKEETVRHRLKVYREKTQPVIDYYSKKGILARVDGSQGIDPAVAEVLGILGWSDK

SEQ ID NO: 1797 - DNA, 693 bp, synthetic construct
  misc_feature 1..693: note = variant of adenylate kinase from Thermotoga neapolitana
  source 1..693: mol_type = other DNA
atgcaccatcatcaccatcacgggggctccggcatgggggcatatctggtgttcttaggtccgccgggcgcgggaaaaggtacccaaggccgtattatttcggcaaagactggcatcccgcatattagcacgggcgatatcctgcgtgacatcgtcgctaagcaaaacgatgaagttgcctcgagcattaaagagatcatggagaaaggtgaactcgttccagatgaactgggtaatgcggtagtaaaacgccgcctgtcggagaaagactgcgaaaaaggctttattttggatggtttcccgcgtaccgtgcgccaagcggaatatctggatagttttcttgaaagccagaatcgccagttgacagccgccgtgctgattgaggtccccgaagatgaagttgttgcacgtctgctgtctcgcctgggttgtccgaaatgcgggcgtagttacaacatgattttcctgccaccaaaagaagacgagctgtgtgacgattgcggtgtcggcttagtacagcgtttagatgataaggaagaaacggtccgtcaccgcctgaaagtctaccgtgagaagacccagccggtcattgactattatagtaagaaaggtattctcaaacgcgtagatgggagcctgggaatcgaccctgtggtggcagaagtcctggggattctgggttggagcgataag

SEQ ID NO: 1798 - protein, 231 aa, synthetic construct
  REGION 1..231: note = variant of adenylate kinase from Thermotoga neapolitana
MHHHHHHGGSGMGAYLVFLGPPGAGKGTQGRIISAKTGIPHISTGDILRDIVAKQNDEVASSIKEIMEKGELVPDELGNAVVKRRLSEKDCEKGFILDGFPRTVRQAEYLDSFLESQNRQLTAAVLIEVPEDEVVARLLSRLGCPKCGRSYNMIFLPPKEDELCDDCGVGLVQRLDDKEETVRHRLKVYREKTQPVIDYYSKKGILKRVDGSLGIDPVVAEVLGILGWSDK

SEQ ID NO: 1799 - DNA, 693 bp, synthetic construct
  misc_feature 1..693: note = variant of adenylate kinase from Thermotoga neapolitana
  source 1..693: mol_type = other DNA
atgcaccatcatcaccatcacgggggctccggcatgggggcatatctggtgttcttaggtccgccgggcgcgggaaaaggtacccaaggccgtattatttcggcaaagactggcatcccgcatattagcacgggcgatatcctgcgtgacatcgtcgctaagcaaaacgatgaagttgcctcgagcattaaagagatcatggagaaaggtgaactcgttccagatgaactgggtaatgcggtagtaaaacgccgcctgtcggagaaagactgcgaaaaaggctttattttggatggtttcccgcgtaccgtgcgccaagcggaatatctggatagttttcttgaaagccagaatcgccagttgacagccgccgtgctgattgaggtccccgaagatgaagttgttgcacgtctgctgtctcgcctgatctgtccgaaatgcgggcgtagtgccaacatgatttttctgccaccaaaagaagacgagctgtgtgacgattgcggtgtcggcttagtacagcgtttagatgataaggaagaaacggtccgtcaccgcctgaaagtctaccgtgagaagacccagccggtcattgactattatagtaagaaaggtattctcaaacgcgtagatgggtcgcaaggaatcgaccctgccgtggcagaagtcctggggattctgggttggagcgataag

SEQ ID NO: 1800 - protein, 231 aa, synthetic construct
  REGION 1..231: note = variant of adenylate kinase from Thermotoga neapolitana
MHHHHHHGGSGMGAYLVFLGPPGAGKGTQGRIISAKTGIPHISTGDILRDIVAKQNDEVASSIKEIMEKGELVPDELGNAVVKRRLSEKDCEKGFILDGFPRTVRQAEYLDSFLESQNRQLTAAVLIEVPEDEVVARLLSRLICPKCGRSANMIFLPPKEDELCDDCGVGLVQRLDDKEETVRHRLKVYREKTQPVIDYYSKKGILKRVDGSQGIDPAVAEVLGILGWSDK

SEQ ID NO: 1801 - DNA, 693 bp, synthetic construct
  misc_feature 1..693: note = variant of adenylate kinase from Thermotoga neapolitana
  source 1..693: mol_type = other DNA
atgcaccatcatcaccatcacgggggctccggcatgggggcatatctggtgttcttaggtccgccgggcgcgggaaaaggtacccaaggccgtattatttcggcaaagactggcatcccgcatattagcacgggcgatatcctgcgtgacatcgtcgctaagcaaaacgatgaagttgcctcgagcattaaagagatcatggagaaaggtgaactcgttccagatgaactgggtaatgcggtagtaaaacgccgcctgtcggagaaagactgcgaaaaaggctttattttggatggtttcccgcgtaccgtgcgccaagcggaatatctggatagttttcttgaaagccagaatcgccagttgacagccgccgtgctgcctgaggtccccgaagatgaagttgttgcacgtctgctgtctcgccgtatctgtccgaaatgcgggcgtagttacaacatgatttttctgccaccaaaagaagacgagctgtgtgacgattgcggtgtcggcttagtacagcgtttagatgataaggaagaaacggtccgtcaccgcctgaaagtctaccgtgagaagacccagccggtcattgactattatagtaagaaaggtattctcaaacgcgtagatgggtcgcaaggaatcgaccctatcgtggcagaagtcctggggattctgggttggagcgataag

SEQ ID NO: 1802 - protein, 231 aa, synthetic construct
  REGION 1..231: note = variant of adenylate kinase from Thermotoga neapolitana
MHHHHHHGGSGMGAYLVFLGPPGAGKGTQGRIISAKTGIPHISTGDILRDIVAKQNDEVASSIKEIMEKGELVPDELGNAVVKRRLSEKDCEKGFILDGFPRTVRQAEYLDSFLESQNRQLTAAVLPEVPEDEVVARLLSRRICPKCGRSYNMIFLPPKEDELCDDCGVGLVQRLDDKEETVRHRLKVYREKTQPVIDYYSKKGILKRVDGSQGIDPIVAEVLGILGWSDK

SEQ ID NO: 1803 - DNA, 693 bp, synthetic construct
  misc_feature 1..693: note = variant of adenylate kinase from Thermotoga neapolitana
  source 1..693: mol_type = other DNA
atgcaccatcatcaccatcacgggggctccggcatgggggcatatctggtgttcttaggtccgccgggcgcgggaaaaggtacccaaggccgtattatttcggcaaagactggcatcccgcatattagcacgggcgatatcctgcgtgacatcgtcgctaagcaaaacgatgaagttgcctcgagcattaaagagatcatggaaaaaggtgaactcgttccagatgaactgggtaatgcggtagtaaaacgccgcctgtcggagaaagactgcgaaaaaggctttattttggatggtttcccgcgtaccgtgcgccaagcggaatatctggatagttttcttgaaagccagaatcgccagttgacagccgccgtgctgattgaggtccccgaagatgaagttgttgcacgtctgctgtctcgccgtatctgtccgaaatgcgggcgtagtgccaacatgatttttctgccaccaaaagaagacgagctgtgtgacgattgcggtgtcggcttagtacagcgtttagatgataaggaagaaacggtccgtcaccgcctgaaagtctaccgtgagaagacccagccggtcattgactattatagtaagaaaggtattctcaaacgcgtagatgggtcgcaaggaatcgaccctgtcgtggcagaagtcctggggattctgggttggagcgataag

SEQ ID NO: 1804 - protein, 231 aa, synthetic construct
  REGION 1..231: note = variant of adenylate kinase from Thermotoga neapolitana
MHHHHHHGGSGMGAYLVFLGPPGAGKGTQGRIISAKTGIPHISTGDILRDIVAKQNDEVASSIKEIMEKGELVPDELGNAVVKRRLSEKDCEKGFILDGFPRTVRQAEYLDSFLESQNRQLTAAVLIEVPEDEVVARLLSRRICPKCGRSANMIFLPPKEDELCDDCGVGLVQRLDDKEETVRHRLKVYREKTQPVIDYYSKKGILKRVDGSQGIDPVVAEVLGILGWSDK

SEQ ID NO: 1805 - DNA, 693 bp, synthetic construct
  misc_feature 1..693: note = variant of adenylate kinase from Thermotoga neapolitana
  source 1..693: mol_type = other DNA
atgcaccatcatcaccatcacgggggctccggcatgggggcatatctggtgttcttaggtccgccgggcgcgggaaaaggtacccaaggccgtattatttcggcaaagactggcatcccgcatattagcacgggcgatatcctgcgtgacatcgtcgctaagcaaaacgatgaagttgcctcgagcattaaagagatcatggagaaaggtgaactcgttccagatgaactgggtaatgcggtagtaaaacgccgcctgtcggagaaagactgcgaaaaaggctttattttggatggtttcccgcgtaccgtgcgccaagcggaatatctggatagttttcttgaaagccagaatcgccagttgacagccgccgtgctgattgaggtccccgaagatgaagttgttgcacgtctgctgtctcgcctgagttgtccgaaatgcgggcgtagttacaacatgattgcactgccaccaaaagaagacgagctgtgtgacgattgcggtgtcggcttagtacagcgtttagatgataaggaagaaacggtccgtcaccgcctgaaagtctaccgtgagaagacccagccggtcattgactattatagtaagaaaggtctgctcaaacgcgtagatgggagcctgggaatcgaccctgtggttgcagaagtcctggggattctgggtcgtagcgataag

SEQ ID NO: 1806 - protein, 231 aa, synthetic construct
  REGION 1..231: note = variant of adenylate kinase from Thermotoga neapolitana
MHHHHHHGGSGMGAYLVFLGPPGAGKGTQGRIISAKTGIPHISTGDILRDIVAKQNDEVASSIKEIMEKGELVPDELGNAVVKRRLSEKDCEKGFILDGFPRTVRQAEYLDSFLESQNRQLTAAVLIEVPEDEVVARLLSRLSCPKCGRSYNMIALPPKEDELCDDCGVGLVQRLDDKEETVRHRLKVYREKTQPVIDYYSKKGLLKRVDGSLGIDPVVAEVLGILGRSDK

SEQ ID NO: 1807 - DNA, 693 bp, synthetic construct
  misc_feature 1..693: note = variant of adenylate kinase from Thermotoga neapolitana
  source 1..693: mol_type = other DNA
atgcaccatcatcaccatcacgggggctccggcatgggggcatatctggtgttcttaggtccgccgggcgcgggaaaaggtacccaaggccgtattatttcggcaaagactggcatcccgcatattagcacgggcgatatcctgcgtgacatcgtcgctaagcaaaacgatgaagttgcctcgagcattaaagagatcatggaaaaaggtgaactcgttccagatgaactgggtaatgcggtagtaaaacgccgcctgtcggagaaagactgcgaaaaaggctttattttggatggtttcccgcgtaccgtgcgccaagcggaatatctggatagttttcttgaaagccagaatcgccagttgacagccgccgtgctgcctgaggtccccgaagatgaagttgttgcacgtctgctgtctcgccgtatctgtccgaaatgcgggcgtagttacaacatgatttttctgccaccaaaagaagacgagctgtgtgacgattgcggtgtcggcttagtacagcgtttagatgataaggaagaaacggtccgtcaccgcctgaaagtctaccgtgagaagacccagccggtcattgactattatagtaagaaaggtattctcgcacgcgtagatgggtcgcaaggaatcgaccctgtggtggcagaagtcctggggattctgggttggagcgataag

SEQ ID NO: 1808 - protein, 231 aa, synthetic construct
  REGION 1..231: note = variant of adenylate kinase from Thermotoga neapolitana
MHHHHHHGGSGMGAYLVFLGPPGAGKGTQGRIISAKTGIPHISTGDILRDIVAKQNDEVASSIKEIMEKGELVPDELGNAVVKRRLSEKDCEKGFILDGFPRTVRQAEYLDSFLESQNRQLTAAVLPEVPEDEVVARLLSRRICPKCGRSYNMIFLPPKEDELCDDCGVGLVQRLDDKEETVRHRLKVYREKTQPVIDYYSKKGILARVDGSQGIDPVVAEVLGILGWSDK

SEQ ID NO: 1809 - DNA, 693 bp, synthetic construct
  misc_feature 1..693: note = variant of adenylate kinase from Thermotoga neapolitana
  source 1..693: mol_type = other DNA
atgcaccatcatcaccatcacgggggctccggcatgggggcatatctggtgttcttaggtccgccgggcgcgggaaaaggtacccaaggccgtattatttcggcaaagactggcatcccgcatattagcacgggcgatatcctgcgtgacatcgtcgctaagcaaaacgatgaagttgcctcgagcattaaagagatcatggagaaaggtgaactcgttccagatgaactgggtaatgcggtagtaaaacgccgcctgtcggagaaagactgcgaaaaaggctttattttggatggtttcccgcgtaccgtgcgccaagcggaatatctggatagttttcttgaaagccagaatcgccagttgacagccgccgtgctgcctgaggtccccgaagatgaagttgttgcacgtctgctgtctcgcctgatctgtccgaaatgcgggcgtagttacaacatgatttttctgccaccaaaagaagacgagctgtgtgacgattgcggtgtcggcttagtacagcgtttagatgataaggaagaaacggtccgtcaccgcctgaaagtctaccgtgagaagacccagccggtcattgactattatagtaagaaaggtattctcaaacgcgtagatgggtcgcaaggaatcccacctgccgtggcagaagtcctggggattctgggttggagcgataag

SEQ ID NO: 1810 - protein, 231 aa, synthetic construct
  REGION 1..231: note = variant of adenylate kinase from Thermotoga neapolitana
MHHHHHHGGSGMGAYLVFLGPPGAGKGTQGRIISAKTGIPHISTGDILRDIVAKQNDEVASSIKEIMEKGELVPDELGNAVVKRRLSEKDCEKGFILDGFPRTVRQAEYLDSFLESQNRQLTAAVLPEVPEDEVVARLLSRLICPKCGRSYNMIFLPPKEDELCDDCGVGLVQRLDDKEETVRHRLKVYREKTQPVIDYYSKKGILKRVDGSQGIPPAVAEVLGILGWSDK

SEQ ID NO: 1811 - DNA, 693 bp, synthetic construct
  misc_feature 1..693: note = variant of adenylate kinase from Thermotoga neapolitana
  source 1..693: mol_type = other DNA
atgcaccatcatcaccatcacgggggctccggcatgggggcatatctggtgttcttaggtccgccgggcgcgggaaaaggtacccaaggccgtattatttcggcaaagactggcatcccgcatattagcacgggcgatatcctgcgtgacatcgtcgctaagcaaaacgatgaagttgcctcgagcattaaagagatcatggagaaaggtgaactcgttccagatgaactgggtaatgcggtagtaaaacgccgcctgtcggagaaagactgcgaaaaaggctttattttggatggtttcccgcgtaccgtgcgccaagcggaatatctggatagttttcttgaaagccagaatcgccagttgacagccgccgtgctgattgaggtccccgaagatgaagttgttgcacgtctgctgtctcgccgtatctgtccgaaatgcgggcgtagtgccaacatgatttttctgccaccaaaagaagacgagctgtgtgacgattgcggtgtcggcttagtacagcgtttagatgataaggaagaaacggtccgtcaccgcctgaaagtctaccgtgagaagacccagccggtcattgactattatagtaagaaaggtattctcgcacgcgtagatgggtcgcaaggaatcgaccctgtcgtggcagaagtcctggggattctgggttggagcgataag

SEQ ID NO: 1812 - protein, 231 aa, synthetic construct
  REGION 1..231: note = variant of adenylate kinase from Thermotoga neapolitana
MHHHHHHGGSGMGAYLVFLGPPGAGKGTQGRIISAKTGIPHISTGDILRDIVAKQNDEVASSIKEIMEKGELVPDELGNAVVKRRLSEKDCEKGFILDGFPRTVRQAEYLDSFLESQNRQLTAAVLIEVPEDEVVARLLSRRICPKCGRSANMIFLPPKEDELCDDCGVGLVQRLDDKEETVRHRLKVYREKTQPVIDYYSKKGILARVDGSQGIDPVVAEVLGILGWSDK

SEQ ID NO: 1813 - DNA, 693 bp, synthetic construct
  misc_feature 1..693: note = variant of adenylate kinase from Thermotoga neapolitana
  source 1..693: mol_type = other DNA
atgcaccatcatcaccatcacgggggctccggcatgggggcatatctggtgttcttaggtccgccgggcgcgggaaaaggtacccaaggccgtattatttcggcaaagactggcatcccgcatattagcacgggcgatatcctgcgtgacatcgtcgctaagcaaaacgatgaagttgcctcgagcattaaagagatcatggagaaaggtgaactcgttccagatgaactgggtaatgcggtagtaaaacgccgcctgtcggagaaagactgcgaaaaaggctttattttggatggtttcccgcgtaccgtgcgccaagcggaatatctggatagttttcttgaaagccagaatcgccagttgacagccgccgtgctgattgaggtccccgaagatgaagttgttgcacgtctgctgtctcgcctgagttgtccgaaatgcgggcgtagttacaacatgatttttctgccaccaaaagaagacgagctgtgtgacgattgcggtgtcggcttagtacagcgtttagatgataaggaagaaacggtccgtcaccgcctgaaagtctaccgtgagaagacccagccggtcattgactattatagtaagaaaggtattctcaaacgcgtagatgggtcgcaaggaatcgaccctgtgcctgcagaagtcctggggattctgggttggagcgataag

SEQ ID NO: 1814 - protein, 231 aa, synthetic construct
  REGION 1..231: note = variant of adenylate kinase from Thermotoga neapolitana
MHHHHHHGGSGMGAYLVFLGPPGAGKGTQGRIISAKTGIPHISTGDILRDIVAKQNDEVASSIKEIMEKGELVPDELGNAVVKRRLSEKDCEKGFILDGFPRTVRQAEYLDSFLESQNRQLTAAVLIEVPEDEVVARLLSRLSCPKCGRSYNMIFLPPKEDELCDDCGVGLVQRLDDKEETVRHRLKVYREKTQPVIDYYSKKGILKRVDGSQGIDPVPAEVLGILGWSDK

SEQ ID NO: 1815 - DNA, 693 bp, synthetic construct
  misc_feature 1..693: note = variant of adenylate kinase from Thermotoga neapolitana
  source 1..693: mol_type = other DNA
atgcaccatcatcaccatcacgggggctccggcatgggggcatatctggtgttcttaggtccgccgggcgcgggaaaaggtacccaaggccgtattatttcggcaaagactggcatcccgcatattagcacgggcgatatcctgcgtgacatcgtcgctaagcaaaacgatgaagttgcctcgagcattaaagagatcatggaaaaaggtgaactcgttccagatgaactgggtaatgcggtagtaaaacgccgcctgtcggagaaagactgcgaaaaaggctttattttggatggtttcccgcgtaccgtgcgccaagcggaatatctggatagttttcttgaaagccagaatcgccagttgacagccgccgtgctgcctgaggtccccgaagatgaagttgttgcacgtctgctgtctcgcctgatctgtccgaaatgcgggcgtagttacaacatgatttttctgccaccaaaagaagacgagctgtgtgacgattgcggtgtcggcttagtacagcgtttagatgataaggaagaaacggtccgtcaccgcctgaaagtctaccgtgagaagacccagccggtcattgactattatagtaagaaaggtattctcgcacgcgtagatgggtcgcaaggaatcgaccctgtggtggcagaagtcctggggattctgggttggagcgataag

SEQ ID NO: 1816 - protein, 231 aa, synthetic construct
  REGION 1..231: note = variant of adenylate kinase from Thermotoga neapolitana
MHHHHHHGGSGMGAYLVFLGPPGAGKGTQGRIISAKTGIPHISTGDILRDIVAKQNDEVASSIKEIMEKGELVPDELGNAVVKRRLSEKDCEKGFILDGFPRTVRQAEYLDSFLESQNRQLTAAVLPEVPEDEVVARLLSRLICPKCGRSYNMIFLPPKEDELCDDCGVGLVQRLDDKEETVRHRLKVYREKTQPVIDYYSKKGILARVDGSQGIDPVVAEVLGILGWSDK

SEQ ID NO: 1817 - DNA, 693 bp, synthetic construct
  misc_feature 1..693: note = variant of adenylate kinase from Thermotoga neapolitana
  source 1..693: mol_type = other DNA
atgcaccatcatcaccatcacgggggctccggcatgggggcatatctggtgttcttaggtccgccgggcgcgggaaaaggtacccaaggccgtattatttcggcaaagactggcatcccgcatattagcacgggcgatatcctgcgtgacatcgtcgctaagcaaaacgatgaagttgcctcgagcattaaagagatcatggaaaaaggtgaactcgttccagatgaactgggtaatgcggtagtaaaacgccgcctgtcggagaaagactgcgaaaaaggctttattttggatggtttcccgcgtaccgtgcgccaagcggaatatctggatagttttcttgaaagccagaatcgccagttgacagccgccgtgctgcctgaggtccccgaagatgaagttgttgcacgtctgctgtctcgcctgatctgtccgaaatgcgggcgtagttacaacatgatttttctgccaccaaaagaagacgagctgtgtgacgattgcggtgtcggcttagtacagcgtttagatgataaggaagaaacggtccgtcaccgcctgaaagtctaccgtgagaagacccagccggtcattgactattatagtaagaaaggtattctcaaacgcgtagatgggtcgcaaggaatcgaccctatcgtggcagaagtcctggggattctgggttggagcgataag

SEQ ID NO: 1818 - protein, 231 aa, synthetic construct
  REGION 1..231: note = variant of adenylate kinase from Thermotoga neapolitana
MHHHHHHGGSGMGAYLVFLGPPGAGKGTQGRIISAKTGIPHISTGDILRDIVAKQNDEVASSIKEIMEKGELVPDELGNAVVKRRLSEKDCEKGFILDGFPRTVRQAEYLDSFLESQNRQLTAAVLPEVPEDEVVARLLSRLICPKCGRSYNMIFLPPKEDELCDDCGVGLVQRLDDKEETVRHRLKVYREKTQPVIDYYSKKGILKRVDGSQGIDPIVAEVLGILGWSDK

SEQ ID NO: 1819 - DNA, 693 bp, synthetic construct
  misc_feature 1..693: note = variant of adenylate kinase from Thermotoga neapolitana
  source 1..693: mol_type = other DNA
atgcaccatcatcaccatcacgggggctccggcatgggggcatatctggtgttcttaggtccgccgggcgcgggaaaaggtacccaaggccgtattatttcggcaaagactggcatcccgcatattagcacgggcgatatcctgcgtgacatcgtcgctaagcaaaacgatgaagttgcctcgagcattaaagagatcatggagaaaggtgaactcgttccagatgaactgggtaatgcggtagtaaaacgccgcctgtcggagaaagactgcgaaaaaggctttattttggatggtttcccgcgtaccgtgcgccaagcggaatatctggatagttttcttgaaagccagaatcgccagttgacagccgccgtgctgattgaggtccccgaagatgaagttgttgcacgtctgctgtctcgcctgggttgtccgaaatgcgggcgtagttacaacatgatttttctgccaccaaaagaagacgagctgtgtgacgattgcggtgtcggcttagtacagcgtttagatgataaggaagaaacggtccgtcaccgcctgaaagtctaccgtgagaagacccagccggtcattgactattatagtaagaaaggtattctcaaacgcgtagatgggtcgcaaggaatcgaccctgtgcctgcagaagtcctggggattctgggtcgtagcgataag

SEQ ID NO: 1820 - protein, 231 aa, synthetic construct
  REGION 1..231: note = variant of adenylate kinase from Thermotoga neapolitana
MHHHHHHGGSGMGAYLVFLGPPGAGKGTQGRIISAKTGIPHISTGDILRDIVAKQNDEVASSIKEIMEKGELVPDELGNAVVKRRLSEKDCEKGFILDGFPRTVRQAEYLDSFLESQNRQLTAAVLIEVPEDEVVARLLSRLGCPKCGRSYNMIFLPPKEDELCDDCGVGLVQRLDDKEETVRHRLKVYREKTQPVIDYYSKKGILKRVDGSQGIDPVPAEVLGILGRSDK

SEQ ID NO: 1821 - DNA, 693 bp, synthetic construct
  misc_feature 1..693: note = variant of adenylate kinase from Thermotoga neapolitana
  source 1..693: mol_type = other DNA
atgcaccatcatcaccatcacgggggctccggcatgggggcatatctggtgttcttaggtccgccgggcgcgggaaaaggtacccaaggccgtattatttcggcaaagactggcatcccgcatattagcacgggcgatatcctgcgtgacatcgtcgctaagcaaaacgatgaagttgcctcgagcattaaagagatcatggaaaaaggtgaactcgttccagatgaactgggtaatgcggtagtaaaacgccgcctgtcggagaaagactgcgaaaaaggctttattttggatggtttcccgcgtaccgtgcgccaagcggaatatctggatagttttcttgaaagccagaatcgccagttgacagccgccgtgctgcctgaggtccccgaagatgaagttgttgcacgtctgctgtctcgcctgatctgtccgaaatgcgggcgtagttacaacatgatttttctgccaccaaaagaagacgagctgtgtgacgattgcggtgtcggcttagtacagcgtttagatgataaggaagaaacggtccgtcaccgcctgaaagtctaccgtgagaagacccagccggtcattgactattatagtaagaaaggtattctcaaacgcgtagatgggtcgcaaggaatcccacctgtcgtggcagaagtcctggggattctgggttggagcgataag

SEQ ID NO: 1822 - protein, 231 aa, synthetic construct
  REGION 1..231: note = variant of adenylate kinase from Thermotoga neapolitana
MHHHHHHGGSGMGAYLVFLGPPGAGKGTQGRIISAKTGIPHISTGDILRDIVAKQNDEVASSIKEIMEKGELVPDELGNAVVKRRLSEKDCEKGFILDGFPRTVRQAEYLDSFLESQNRQLTAAVLPEVPEDEVVARLLSRLICPKCGRSYNMIFLPPKEDELCDDCGVGLVQRLDDKEETVRHRLKVYREKTQPVIDYYSKKGILKRVDGSQGIPPVVAEVLGILGWSDK

SEQ ID NO: 1823 - DNA, 693 bp, synthetic construct
  misc_feature 1..693: note = variant of adenylate kinase from Thermotoga neapolitana
  source 1..693: mol_type = other DNA
atgcaccatcatcaccatcacgggggctccggcatgggggcatatctggtgttcttaggtccgccgggcgcgggaaaaggtacccaaggccgtattatttcggcaaagactggcatcccgcatattagcacgggcgatatcctgcgtgacatcgtcgctaagcaaaacgatgaagttgcctcgagcattaaagagatcatgctgaaaggtgaactcgttccagatgaactgggtaatgcggtagtaaaacgccgcctgtcggagaaagactgcgaaaaaggctttattttggatggtttcccgcgtaccgtgcgccaagcggaatatctggatagttttcttgaaagccagaatcgccagttgacagccgccgtgctgcctgaggtccccgaagatgaagttgttgcacgtctgctgtctcgcctgatctgtccgaaatgcgggcgtagttacaacatgatttttctgccaccaaaagaagacgagctgtgtgacgattgcggtgtcggcttagtacagcgtttagatgataaggaagaaacggtccgtcaccgcctgaaagtctaccgtgagaagacccagccggtcattgactattatagtaagaaaggtattctcctgcgcgtagatgggtcgcaaggaatcgaccctgtcgtggcagaagtcctggggattctgggttggagcgataag

SEQ ID NO: 1824 - protein, 231 aa, synthetic construct
  REGION 1..231: note = variant of adenylate kinase from Thermotoga neapolitana
MHHHHHHGGSGMGAYLVFLGPPGAGKGTQGRIISAKTGIPHISTGDILRDIVAKQNDEVASSIKEIMLKGELVPDELGNAVVKRRLSEKDCEKGFILDGFPRTVRQAEYLDSFLESQNRQLTAAVLPEVPEDEVVARLLSRLICPKCGRSYNMIFLPPKEDELCDDCGVGLVQRLDDKEETVRHRLKVYREKTQPVIDYYSKKGILLRVDGSQGIDPVVAEVLGILGWSDK

SEQ ID NO: 1825 - DNA, 693 bp, synthetic construct
  misc_feature 1..693: note = variant of adenylate kinase from Thermotoga neapolitana
  source 1..693: mol_type = other DNA
atgcaccatcatcaccatcacgggggctccggcatgggggcatatctggtgttcttaggtccgccgggcgcgggaaaaggtacccaaggccgtattatttcggcaaagactggcatcccgcatattagcacgggcgatatcctgcgtgacatcgtcgctaagcaaaacgatgaagttgcctcgagcattaaagagatcatggagaaaggtgaactcgttccagatgaactgggtaatgcggtagtaaaacgccgcctgtcggagaaagactgcgaaaaaggctttattttggatggtttcccgcgtaccgtgcgccaagcggaatatctggatagttttcttgaaagccagaatcgccagttgacagccgccgtgctgattgaggtccccgaagatgaagttgttgcacgtctgctgtctcgcctgggttgtccgaaatgcgggcgtagttacaacatgattgcactgccaccaaaagaagacgagctgtgtgacgattgcggtgtcggcttagtacagcgtttagatgataaggaagaaacggtccgtcaccgcctgaaagtctaccgtgagaagacccagccggtcattgactattatagtaagaaaggtattctcaaacgcgtagatgggcgccagggaatcgaccctgtggtggcagaagtcctggggattctgggtcgtagcgataag

SEQ ID NO: 1826 - protein, 231 aa, synthetic construct
  REGION 1..231: note = variant of adenylate kinase from Thermotoga neapolitana
MHHHHHHGGSGMGAYLVFLGPPGAGKGTQGRIISAKTGIPHISTGDILRDIVAKQNDEVASSIKEIMEKGELVPDELGNAVVKRRLSEKDCEKGFILDGFPRTVRQAEYLDSFLESQNRQLTAAVLIEVPEDEVVARLLSRLGCPKCGRSYNMIALPPKEDELCDDCGVGLVQRLDDKEETVRHRLKVYREKTQPVIDYYSKKGILKRVDGRQGIDPVVAEVLGILGRSDK

SEQ ID NO: 1827 - DNA, 693 bp, synthetic construct
  misc_feature 1..693: note = variant of adenylate kinase from Thermotoga neapolitana
  source 1..693: mol_type = other DNA
atgcaccatcatcaccatcacgggggctccggcatgggggcatatctggtgttcttaggtccgccgggcgcgggaaaaggtacccaaggccgtattatttcggcaaagactggcatcccgcatattagcacgggcgatatcctgcgtgacatcgtcgctaagcaaaacgatgaagttgcctcgagcattaaagagatcatggaaaaaggtgaactcgttccagatgaactgggtaatgcggtagtaaaacgccgcctgtcggagaaagactgcgaaaaaggctttattttggatggtttcccgcgtaccgtgcgccaagcggaatatctggatagttttcttgaaagccagaatcgccagttgacagccgccgtgctgattgaggtccccgaagatgaagttgttgcacgtctgctgtctcgcctgatctgtccgaaatgcgggcgtagtgccaacatgatttttctgccaccaaaagaagacgagctgtgtgacgattgcggtgtcggcttagtacagcgtttagatgataaggaagaaacggtccgtcaccgcctgaaagtctaccgtgagaagacccagccggtcattgactattatagtaagaaaggtattctcaaacgcgtagatgggtcgcaaggaatcgaccctgtggtggcagaagtcctggggattctgggttggagcgataag

SEQ ID NO: 1828 - protein, 231 aa, synthetic construct
  REGION 1..231: note = variant of adenylate kinase from Thermotoga neapolitana
MHHHHHHGGSGMGAYLVFLGPPGAGKGTQGRIISAKTGIPHISTGDILRDIVAKQNDEVASSIKEIMEKGELVPDELGNAVVKRRLSEKDCEKGFILDGFPRTVRQAEYLDSFLESQNRQLTAAVLIEVPEDEVVARLLSRLICPKCGRSANMIFLPPKEDELCDDCGVGLVQRLDDKEETVRHRLKVYREKTQPVIDYYSKKGILKRVDGSQGIDPVVAEVLGILGWSDK

SEQ ID NO: 1829 - DNA, 693 bp, synthetic construct
  misc_feature 1..693: note = variant of adenylate kinase from Thermotoga neapolitana
  source 1..693: mol_type = other DNA
atgcaccatcatcaccatcacgggggctccggcatgggggcatatctggtgttcttaggtccgccgggcgcgggaaaaggtacccaaggccgtattatttcggcaaagactggcatcccgcatattagcacgggcgatatcctgcgtgacatcgtcgctaagcaaaacgatgaagttgcctcgagcattaaagagatcatggagaaaggtgaactcgttccagatgaactgggtaatgcggtagtaaaacgccgcctgtcggagaaagactgcgaaaaaggctttattttggatggtttcccgcgtaccgtgcgccaagcggaatatctggatagttttcttgaaagccagaatcgccagttgacagccgccgtgctgattgaggtccccgaagatgaagttgttgcacgtctgctgtctcgcctgagttgtccgaaatgcgggcgtagttacaacatgattttcctgccaccaaaagaagacgagctgtgtgacgattgcggtgtcggcttagtacagcgtttagatgataaggaagaaacggtccgtcaccgcctgaaagtctaccgtgagaagacccagccggtcattgactattatagtaagaaaggtattctcaaacgcgtagatgggtcgcaaggaatcgaccctgtgcctgcagaagtcctggggattctgggtcgtagcgataag

SEQ ID NO: 1830 - protein, 231 aa, synthetic construct
  REGION 1..231: note = variant of adenylate kinase from Thermotoga neapolitana
MHHHHHHGGSGMGAYLVFLGPPGAGKGTQGRIISAKTGIPHISTGDILRDIVAKQNDEVASSIKEIMEKGELVPDELGNAVVKRRLSEKDCEKGFILDGFPRTVRQAEYLDSFLESQNRQLTAAVLIEVPEDEVVARLLSRLSCPKCGRSYNMIFLPPKEDELCDDCGVGLVQRLDDKEETVRHRLKVYREKTQPVIDYYSKKGILKRVDGSQGIDPVPAEVLGILGRSDK

SEQ ID NO: 1831 - DNA, 693 bp, synthetic construct
  misc_feature 1..693: note = variant of adenylate kinase from Thermotoga neapolitana
  source 1..693: mol_type = other DNA
atgcaccatcatcaccatcacgggggctccggcatgggggcatatctggtgttcttaggtccgccgggcgcgggaaaaggtacccaaggccgtattatttcggcaaagactggcatcccgcatattagcacgggcgatatcctgcgtgacatcgtcgctaagcaaaacgatgaagttgcctcgagcattaaagagatcatggagaaaggtgaactcgttccagatgaactgggtaatgcggtagtaaaacgccgcctgtcggagaaagactgcgaaaaaggctttattttggatggtttcccgcgtaccgtgcgccaagcggaatatctggatagttttcttgaaagccagaatcgccagttgacagccgccgtgctgattgaggtccccgaagatgaagttgttgcacgtctgctgtctcgcctgagttgtccgaaatgcgggcgtagttacaacatgattttcctgccaccaaaagaagacgagctgtgtgacgattgcggtgtcggcttagtacagcgtttagatgataaggaagaaacggtccgtcaccgcctgaaagtctaccgtgagaagacccagccggtcattgactattatagtaagaaaggtattctcaaacgcgtagatgggagcctgggaatcgaccctgtggtggcagaagtcctggggattctgggtcgtagcgataag

SEQ ID NO: 1832 - protein, 231 aa, synthetic construct
  REGION 1..231: note = variant of adenylate kinase from Thermotoga neapolitana
MHHHHHHGGSGMGAYLVFLGPPGAGKGTQGRIISAKTGIPHISTGDILRDIVAKQNDEVASSIKEIMEKGELVPDELGNAVVKRRLSEKDCEKGFILDGFPRTVRQAEYLDSFLESQNRQLTAAVLIEVPEDEVVARLLSRLSCPKCGRSYNMIFLPPKEDELCDDCGVGLVQRLDDKEETVRHRLKVYREKTQPVIDYYSKKGILKRVDGSLGIDPVVAEVLGILGRSDK

SEQ ID NO: 1833 - DNA, 693 bp, synthetic construct
  misc_feature 1..693: note = variant of adenylate kinase from Thermotoga neapolitana
  source 1..693: mol_type = other DNA
atgcaccatcatcaccatcacgggggctccggcatgggggcatatctggtgttcttaggtccgccgggcgcgggaaaaggtacccaaggccgtattatttcggcaaagactggcatcccgcatattagcacgggcgatatcctgcgtgacatcgtcgctaagcaaaacgatgaagttgcctcgagcattaaagagatcatggagaaaggtgaactcgttccagatgaactgggtaatgcggtagtaaaacgccgcctgtcggagaaagactgcgaaaaaggctttattttggatggtttcccgcgtaccgtgcgccaagcggaatatctggatagttttcttgaaagccagaatcgccagttgacagccgccgtgctgattgaggtccccgaagatgaagttgttgcacgtctgctgtctcgcctgggttgtccgaaatgcgggcgtagttacaacatgattgcactgccaccaaaagaagacgagctgtgtgacgattgcggtgtcggcttagtacagcgtttagatgataaggaagaaacggtccgtcaccgcctgaaagtctaccgtgagaagacccagccggtcattgactattatagtaagaaaggtctgctcaaacgcgtagatgggagccagggaatcgaccctgtggtggcagaagtcctggggattctgggttggagcgataag

SEQ ID NO: 1834 - protein, 231 aa, synthetic construct
  REGION 1..231: note = variant of adenylate kinase from Thermotoga neapolitana
MHHHHHHGGSGMGAYLVFLGPPGAGKGTQGRIISAKTGIPHISTGDILRDIVAKQNDEVASSIKEIMEKGELVPDELGNAVVKRRLSEKDCEKGFILDGFPRTVRQAEYLDSFLESQNRQLTAAVLIEVPEDEVVARLLSRLGCPKCGRSYNMIALPPKEDELCDDCGVGLVQRLDDKEETVRHRLKVYREKTQPVIDYYSKKGLLKRVDGSQGIDPVVAEVLGILGWSDK

SEQ ID NO: 1835 - DNA, 693 bp, synthetic construct
  misc_feature 1..693: note = variant of adenylate kinase from Thermotoga neapolitana
  source 1..693: mol_type = other DNA
atgcaccatcatcaccatcacgggggctccggcatgggggcatatctggtgttcttaggtccgccgggcgcgggaaaaggtacccaaggccgtattatttcggcaaagactggcatcccgcatattagcacgggcgatatcctgcgtgacatcgtcgctaagcaaaacgatgaagttgcctcgagcattaaagagatcatggaaaaaggtgaactcgttccagatgaactgggtaatgcggtagtaaaacgccgcctgtcggagaaagactgcgaaaaaggctttattttggatggtttcccgcgtaccgtgcgccaagcggaatatctggatagttttcttgaaagccagaatcgccagttgacagccgccgtgctgattgaggtccccgaagatgaagttgttgcacgtctgctgtctcgcctgatctgtccgaaatgcgggcgtagtgccaacatgatttttctgccaccaaaagaagacgagctgtgtgacgattgcggtgtcggcttagtacagcgtttagatgataaggaagaaacggtccgtcaccgcctgaaagtctaccgtgagaagacccagccggtcattgactattatagtaagaaaggtattctcgcacgcgtagatgggtcgcaaggaatcccacctgtcgtggcagaagtcctggggattctgggttggagcgataag

SEQ ID NO: 1836 - protein, 231 aa, synthetic construct
  REGION 1..231: note = variant of adenylate kinase from Thermotoga neapolitana
MHHHHHHGGSGMGAYLVFLGPPGAGKGTQGRIISAKTGIPHISTGDILRDIVAKQNDEVASSIKEIMEKGELVPDELGNAVVKRRLSEKDCEKGFILDGFPRTVRQAEYLDSFLESQNRQLTAAVLIEVPEDEVVARLLSRLICPKCGRSANMIFLPPKEDELCDDCGVGLVQRLDDKEETVRHRLKVYREKTQPVIDYYSKKGILARVDGSQGIPPVVAEVLGILGWSDK

SEQ ID NO: 1837 - DNA, 693 bp, synthetic construct
  misc_feature 1..693: note = variant of adenylate kinase from Thermotoga neapolitana
  source 1..693: mol_type = other DNA
atgcaccatcatcaccatcacgggggctccggcatgggggcatatctggtgttcttaggtccgccgggcgcgggaaaaggtacccaaggccgtattatttcggcaaagactggcatcccgcatattagcacgggcgatatcctgcgtgacatcgtcgctaagcaaaacgatgaagttgcctcgagcattaaagagatcatggagaaaggtgaactcgttccagatgaactgggtaatgcggtagtaaaacgccgcctgtcggagaaagactgcgaaaaaggctttattttggatggtttcccgcgtaccgtgcgccaagcggaatatctggatagttttcttgaaagccagaatcgccagttgacagccgccgtgctgattgaggtccccgaagatgaagttgttgcacgtctgctgtctcgcctgggttgtccgaaatgcgggcgtagttacaacatgattttcctgccaccaaaagaagacgagctgtgtgacgattgcggtgtcggcttagtacagcgtttagatgataaggaagaaacggtccgtcaccgcctgaaagtctaccgtgagaagacccagccggtcattgactattatagtaagaaaggtattctcaaacgcgtagatgggtcgcaaggaatcgaccctgtggtggcagaagtcctggggattctgggtcgtagcgataag

SEQ ID NO: 1838 - protein, 231 aa, synthetic construct
  REGION 1..231: note = variant of adenylate kinase from Thermotoga neapolitana
MHHHHHHGGSGMGAYLVFLGPPGAGKGTQGRIISAKTGIPHISTGDILRDIVAKQNDEVASSIKEIMEKGELVPDELGNAVVKRRLSEKDCEKGFILDGFPRTVRQAEYLDSFLESQNRQLTAAVLIEVPEDEVVARLLSRLGCPKCGRSYNMIFLPPKEDELCDDCGVGLVQRLDDKEETVRHRLKVYREKTQPVIDYYSKKGILKRVDGSQGIDPVVAEVLGILGRSDK

SEQ ID NO: 1839 - DNA, 693 bp, synthetic construct
  misc_feature 1..693: note = variant of adenylate kinase from Thermotoga neapolitana
  source 1..693: mol_type = other DNA
atgcaccatcatcaccatcacgggggctccggcatgggggcatatctggtgttcttaggtccgccgggcgcgggaaaaggtacccaaggccgtattatttcggcaaagactggcatcccgcatattagcacgggcgatatcctgcgtgacatcgtcgctaagcaaaacgatgaagttgcctcgagcattaaagagatcatgctgaaaggtgaactcgttccagatgaactgggtaatgcggtagtaaaacgccgcctgtcggagaaagactgcgaaaaaggctttattttggatggtttcccgcgtaccgtgcgccaagcggaatatctggatagttttcttgaaagccagaatcgccagttgacagccgccgtgctgcctgaggtccccgaagatgaagttgttgcacgtctgctgtctcgcctgatctgtccgaaatgcgggcgtagttacaacatgatttttctgccaccaaaagaagacgagctgtgtgacgattgcggtgtcggcttagtacagcgtttagatgataaggaagaaacggtccgtcaccgcctgaaagtctaccgtgagaagacccagccggtcattgactattatagtaagaaaggtattctcgcacgcgtagatgggtcgcaaggaatcgaccctgtggtggcagaagtcctggggattctgggttggagcgataag

SEQ ID NO: 1840 - protein, 231 aa, synthetic construct
  REGION 1..231: note = variant of adenylate kinase from Thermotoga neapolitana
MHHHHHHGGSGMGAYLVFLGPPGAGKGTQGRIISAKTGIPHISTGDILRDIVAKQNDEVASSIKEIMLKGELVPDELGNAVVKRRLSEKDCEKGFILDGFPRTVRQAEYLDSFLESQNRQLTAAVLPEVPEDEVVARLLSRLICPKCGRSYNMIFLPPKEDELCDDCGVGLVQRLDDKEETVRHRLKVYREKTQPVIDYYSKKGILARVDGSQGIDPVVAEVLGILGWSDK

SEQ ID NO: 1841 - DNA, 693 bp, synthetic construct
  misc_feature 1..693: note = variant of adenylate kinase from Thermotoga neapolitana
  source 1..693: mol_type = other DNA
atgcaccatcatcaccatcacgggggctccggcatgggggcatatctggtgttcttaggtccgccgggcgcgggaaaaggtacccaaggccgtattatttcggcaaagactggcatcccgcatattagcacgggcgatatcctgcgtgacatcgtcgctaagcaaaacgatgaagttgcctcgagcattaaagagatcatgctgaaaggtgaactcgttccagatgaactgggtaatgcggtagtaaaacgccgcctgtcggagaaagactgcgaaaaaggctttattttggatggtttcccgcgtaccgtgcgccaagcggaatatctggatagttttcttgaaagccagaatcgccagttgacagccgccgtgctgcctgaggtccccgaagatgaagttgttgcacgtctgctgtctcgcctgatctgtccgaaatgcgggcgtagttacaacatgatttttctgccaccaaaagaagacgagctgtgtgacgattgcggtgtcggcttagtacagcgtttagatgataaggaagaaacggtccgtcaccgcctgaaagtctaccgtgagaagacccagccggtcattgactattatagtaagaaaggtattctcgcacgcgtagatgggtcgcaaggaatcgaccctgccgtggcagaagtcctggggattctgggttggagcgataag

SEQ ID NO: 1842 - protein, 231 aa, synthetic construct
  REGION 1..231: note = variant of adenylate kinase from Thermotoga neapolitana
MHHHHHHGGSGMGAYLVFLGPPGAGKGTQGRIISAKTGIPHISTGDILRDIVAKQNDEVASSIKEIMLKGELVPDELGNAVVKRRLSEKDCEKGFILDGFPRTVRQAEYLDSFLESQNRQLTAAVLPEVPEDEVVARLLSRLICPKCGRSYNMIFLPPKEDELCDDCGVGLVQRLDDKEETVRHRLKVYREKTQPVIDYYSKKGILARVDGSQGIDPAVAEVLGILGWSDK

SEQ ID NO: 1843 - DNA, 693 bp, synthetic construct
  misc_feature 1..693: note = variant of adenylate kinase from Thermotoga neapolitana
  source 1..693: mol_type = other DNA
atgcaccatcatcaccatcacgggggctccggcatgggggcatatctggtgttcttaggtccgccgggcgcgggaaaaggtacccaaggccgtattatttcggcaaagactggcatcccgcatattagcacgggcgatatcctgcgtgacatcgtcgctaagcaaaacgatgaagttgcctcgagcattaaagagatcatggagaaaggtgaactcgttccagatgaactgggtaatgcggtagtaaaacgccgcctgtcggagaaagactgcgaaaaaggctttattttggatggtttcccgcgtaccgtgcgccaagcggaatatctggatagttttcttgaaagccagaatcgccagttgacagccgccgtgctgattgaggtccccgaagatgaagttgttgcacgtctgctgtctcgcctgggttgtccgaaatgcgggcgtagttacaacatgattgcactgccaccaaaagaagacgagctgtgtgacgattgcggtgtcggcttagtacagcgtttagatgataaggaagaaacggtccgtcaccgcctgaaagtctaccgtgagaagacccagccggtcattgactattatagtaagaaaggtattctcaaacgcgtagatgggtcgcaaggaatcgaccctgtggtggcagaagtcctggggattctgggttggagcgataag

SEQ ID NO: 1844 - protein, 231 aa, synthetic construct
  REGION 1..231: note = variant of adenylate kinase from Thermotoga neapolitana
MHHHHHHGGSGMGAYLVFLGPPGAGKGTQGRIISAKTGIPHISTGDILRDIVAKQNDEVASSIKEIMEKGELVPDELGNAVVKRRLSEKDCEKGFILDGFPRTVRQAEYLDSFLESQNRQLTAAVLIEVPEDEVVARLLSRLGCPKCGRSYNMIALPPKEDELCDDCGVGLVQRLDDKEETVRHRLKVYREKTQPVIDYYSKKGILKRVDGSQGIDPVVAEVLGILGWSDK

SEQ ID NO: 1845 - DNA, 693 bp, synthetic construct
  misc_feature 1..693: note = variant of adenylate kinase from Thermotoga neapolitana
  source 1..693: mol_type = other DNA
atgcaccatcatcaccatcacgggggctccggcatgggggcatatctggtgttcttaggtccgccgggcgcgggaaaaggtacccaaggccgtattatttcggcaaagactggcatcccgcatattagcacgggcgatatcctgcgtgacatcgtcgctaagcaaaacgatgaagttgcctcgagcattaaagagatcatggagaaaggtgaactcgttccagatgaactgggtaatgcggtagtaaaacgccgcctgtcggagaaagactgcgaaaaaggctttattttggatggtttcccgcgtaccgtgcgccaagcggaatatctggatagttttcttgaaagccagaatcgccagttgacagccgccgtgctgattgaggtccccgaagatgaagttgttgcacgtctgctgtctcgcctgggttgtccgaaatgcgggcgtagttacaacatgatttttctgccaccaaaagaagacgagctgtgtgacgattgcggtgtcggcttagtacagcgtttagatgataaggaagaaacggtccgtcaccgcctgaaagtctaccgtgagaagacccagccggtcattgactattatagtaagaaaggtattctcaaacgcgtagatgggagccagggaatcgaccctgtggttgcagaagtcctggggattctgggttggagcgataag

SEQ ID NO: 1846 - protein, 231 aa, synthetic construct
  REGION 1..231: note = variant of adenylate kinase from Thermotoga neapolitana
MHHHHHHGGSGMGAYLVFLGPPGAGKGTQGRIISAKTGIPHISTGDILRDIVAKQNDEVASSIKEIMEKGELVPDELGNAVVKRRLSEKDCEKGFILDGFPRTVRQAEYLDSFLESQNRQLTAAVLIEVPEDEVVARLLSRLGCPKCGRSYNMIFLPPKEDELCDDCGVGLVQRLDDKEETVRHRLKVYREKTQPVIDYYSKKGILKRVDGSQGIDPVVAEVLGILGWSDK

SEQ ID NO: 1847 - DNA, 693 bp, synthetic construct
  misc_feature 1..693: note = variant of adenylate kinase from Thermotoga neapolitana
  source 1..693: mol_type = other DNA
atgcaccatcatcaccatcacgggggctccggcatgggggcatatctggtgttcttaggtccgccgggcgcgggaaaaggtacccaaggccgtattatttcggcaaagactggcatcccgcatattagcacgggcgatatcctgcgtgacatcgtcgctaagcaaaacgatgaagttgcctcgagcattaaagagatcatggagaaaggtgaactcgttccagatgaactgggtaatgcggtagtaaaacgccgcctgtcggagaaagactgcgaaaaaggctttattttggatggtttcccgcgtaccgtgcgccaagcggaatatctggatagttttcttgaaagccagaatcgccagttgacagccgccgtgctgattgaggtccccgaagatgaagttgttgcacgtctgctgtctcgcctgatctgtccgaaatgcgggcgtagttacaacatgatttttctgccaccaaaagaagacgagctgtgtgacgattgcggtgtcggcttagtacagcgtttagatgataaggaagaaacggtccgtcaccgcctgaaagtctaccgtgagaagacccagccggtcattgactattatagtaagaaaggtctgctcaaacgcgtagatgggagcctgggaatcgaccctgtgcctgcagaagtcctggggattctgggttggagcgataag

SEQ ID NO: 1848 - protein, 231 aa, synthetic construct
  REGION 1..231: note = variant of adenylate kinase from Thermotoga neapolitana
MHHHHHHGGSGMGAYLVFLGPPGAGKGTQGRIISAKTGIPHISTGDILRDIVAKQNDEVASSIKEIMEKGELVPDELGNAVVKRRLSEKDCEKGFILDGFPRTVRQAEYLDSFLESQNRQLTAAVLIEVPEDEVVARLLSRLICPKCGRSYNMIFLPPKEDELCDDCGVGLVQRLDDKEETVRHRLKVYREKTQPVIDYYSKKGLLKRVDGSLGIDPVPAEVLGILGWSDK

SEQ ID NO: 1849 - DNA, 693 bp, synthetic construct
  misc_feature 1..693: note = variant of adenylate kinase from Thermotoga neapolitana
  source 1..693: mol_type = other DNA
atgcaccatcatcaccatcacgggggctccggcatgggggcatatctggtgttcttaggtccgccgggcgcgggaaaaggtacccaaggccgtattatttcggcaaagactggcatcccgcatattagcacgggcgatatcctgcgtgacatcgtcgctaagcaaaacgatgaagttgcctcgagcattaaagagatcatggagaaaggtgaactcgttccagatgaactgggtaatgcggtagtaaaacgccgcctgtcggagaaagactgcgaaaaaggctttattttggatggtttcccgcgtaccgtgcgccaagcggaatatctggatagttttcttgaaagccagaatcgccagttgacagccgccgtgctgattgaggtccccgaagatgaagttgttgcacgtctgctgtctcgcctgatctgtccgaaatgcgggcgtagttacaacatgattgcactgccaccaaaagaagacgagctgtgtgacgattgcggtgtcggcttagtacagcgtttagatgataaggaagaaacggtccgtcaccgcctgaaagtctaccgtgagaagacccagccggtcattgactattatagtaagaaaggtattctcaaacgcgtagatgggcgccagggaatcgaccctgtgcctgcagaagtcctggggattctgggtcgtagcgataag

SEQ ID NO: 1850 - protein, 231 aa, synthetic construct
  REGION 1..231: note = variant of adenylate kinase from Thermotoga neapolitana
MHHHHHHGGSGMGAYLVFLGPPGAGKGTQGRIISAKTGIPHISTGDILRDIVAKQNDEVASSIKEIMEKGELVPDELGNAVVKRRLSEKDCEKGFILDGFPRTVRQAEYLDSFLESQNRQLTAAVLIEVPEDEVVARLLSRLICPKCGRSYNMIALPPKEDELCDDCGVGLVQRLDDKEETVRHRLKVYREKTQPVIDYYSKKGILKRVDGRQGIDPVPAEVLGILGRSDK

SEQ ID NO: 1851 - DNA, 693 bp, synthetic construct
  misc_feature 1..693: note = variant of adenylate kinase from Thermotoga neapolitana
  source 1..693: mol_type = other DNA
atgcaccatcatcaccatcacgggggctccggcatgggggcatatctggtgttcttaggtccgccgggcgcgggaaaaggtacccaaggccgtattatttcggcaaagactggcatcccgcatattagcacgggcgatatcctgcgtgacatcgtcgctaagcaaaacgatgaagttgcctcgagcattaaagagatcatggagaaaggtgaactcgttccagatgaactgggtaatgcggtagtaaaacgccgcctgtcggagaaagactgcgaaaaaggctttattttggatggtttcccgcgtaccgtgcgccaagcggaatatctggatagttttcttgaaagccagaatcgccagttgacagccgccgtgctgattgaggtccccgaagatgaagttgttgcacgtctgctgtctcgcctgagttgtccgaaatgcgggcgtagttacaacatgattttcctgccaccaaaagaagacgagctgtgtgacgattgcggtgtcggcttagtacagcgtttagatgataaggaagaaacggtccgtcaccgcctgaaagtctaccgtgagaagacccagccggtcattgactattatagtaagaaaggtattctcaaacgcgtagatgggagccagggaatcgaccctgtggttgcagaagtcctggggattctgggtcgtagcgataag

SEQ ID NO: 1852 - protein, 231 aa, synthetic construct
  REGION 1..231: note = variant of adenylate kinase from Thermotoga neapolitana
MHHHHHHGGSGMGAYLVFLGPPGAGKGTQGRIISAKTGIPHISTGDILRDIVAKQNDEVASSIKEIMEKGELVPDELGNAVVKRRLSEKDCEKGFILDGFPRTVRQAEYLDSFLESQNRQLTAAVLIEVPEDEVVARLLSRLSCPKCGRSYNMIFLPPKEDELCDDCGVGLVQRLDDKEETVRHRLKVYREKTQPVIDYYSKKGILKRVDGSQGIDPVVAEVLGILGRSDK

SEQ ID NO: 1853 - DNA, 693 bp, synthetic construct
  misc_feature 1..693: note = variant of adenylate kinase from Thermotoga neapolitana
  source 1..693: mol_type = other DNA
atgcaccatcatcaccatcacgggggctccggcatgggggcatatctggtgttcttaggtccgccgggcgcgggaaaaggtacccaaggccgtattatttcggcaaagactggcatcccgcatattagcacgggcgatatcctgcgtgacatcgtcgctaagcaaaacgatgaagttgcctcgagcattaaagagatcatggagaaaggtgaactcgttccagatgaactgggtaatgcggtagtaaaacgccgcctgtcggagaaagactgcgaaaaaggctttattttggatggtttcccgcgtaccgtgcgccaagcggaatatctggatagttttcttgaaagccagaatcgccagttgacagccgccgtgctgattgaggtccccgaagatgaagttgttgcacgtctgctgtctcgcctgatctgtccgaaatgcgggcgtagttacaacatgatttttctgccaccaaaagaagacgagctgtgtgacgattgcggtgtcggcttagtacagcgtttagatgataaggaagaaacggtccgtcaccgcctgaaagtctaccgtgagaagacccagccggtcattgactattatagtaagaaaggtctgctcaaacgcgtagatgggagccagggaatcgaccctgtgcctgcagaagtcctggggattctgggtcgtagcgataag

SEQ ID NO: 1854 - protein, 231 aa, synthetic construct
  REGION 1..231: note = variant of adenylate kinase from Thermotoga neapolitana
MHHHHHHGGSGMGAYLVFLGPPGAGKGTQGRIISAKTGIPHISTGDILRDIVAKQNDEVASSIKEIMEKGELVPDELGNAVVKRRLSEKDCEKGFILDGFPRTVRQAEYLDSFLESQNRQLTAAVLIEVPEDEVVARLLSRLICPKCGRSYNMIFLPPKEDELCDDCGVGLVQRLDDKEETVRHRLKVYREKTQPVIDYYSKKGLLKRVDGSQGIDPVPAEVLGILGRSDK

SEQ ID NO: 1855 - DNA, 693 bp, synthetic construct
  misc_feature 1..693: note = variant of adenylate kinase from Thermotoga neapolitana
  source 1..693: mol_type = other DNA
atgcaccatcatcaccatcacgggggctccggcatgggggcatatctggtgttcttaggtccgccgggcgcgggaaaaggtacccaaggccgtattatttcggcaaagactggcatcccgcatattagcacgggcgatatcctgcgtgacatcgtcgctaagcaaaacgatgaagttgcctcgagcattaaagagatcatggagaaaggtgaactcgttccagatgaactgggtaatgcggtagtaaaacgccgcctgtcggagaaagactgcgaaaaaggctttattttggatggtttcccgcgtaccgtgcgccaagcggaatatctggatagttttcttgaaagccagaatcgccagttgacagccgccgtgctgattgaggtccccgaagatgaagttgttgcacgtctgctgtctcgcctgggttgtccgaaatgcgggcgtagttacaacatgatttttctgccaccaaaagaagacgagctgtgtgacgattgcggtgtcggcttagtacagcgtttagatgataaggaagaaacggtccgtcaccgcctgaaagtctaccgtgagaagacccagccggtcattgactattatagtaagaaaggtctgctcaaacgcgtagatgggtcgcaaggaatcgaccctgtggtggcagaagtcctggggattctgggttggagcgataag

SEQ ID NO: 1856 - protein, 231 aa, synthetic construct
  REGION 1..231: note = variant of adenylate kinase from Thermotoga neapolitana
MHHHHHHGGSGMGAYLVFLGPPGAGKGTQGRIISAKTGIPHISTGDILRDIVAKQNDEVASSIKEIMEKGELVPDELGNAVVKRRLSEKDCEKGFILDGFPRTVRQAEYLDSFLESQNRQLTAAVLIEVPEDEVVARLLSRLGCPKCGRSYNMIFLPPKEDELCDDCGVGLVQRLDDKEETVRHRLKVYREKTQPVIDYYSKKGLLKRVDGSQGIDPVVAEVLGILGWSDK

SEQ ID NO: 1857 - DNA, 693 bp, synthetic construct
  misc_feature 1..693: note = variant of adenylate kinase from Thermotoga neapolitana
  source 1..693: mol_type = other DNA
atgcaccatcatcaccatcacgggggctccggcatgggggcatatctggtgttcttaggtccgccgggcgcgggaaaaggtacccaaggccgtattatttcggcaaagactggcatcccgcatattagcacgggcgatatcctgcgtgacatcgtcgctaagcaaaacgatgaagttgcctcgagcattaaagagatcatggagaaaggtgaactcgttccagatgaactgggtaatgcggtagtaaaacgccgcctgtcggagaaagactgcgaaaaaggctttattttggatggtttcccgcgtaccgtgcgccaagcggaatatctggatagttttcttgaaagccagaatcgccagttgacagccgccgtgctgattgaggtccccgaagatgaagttgttgcacgtctgctgtctcgccgtatctgtccgaaatgcgggcgtagttacaacatgatttttctgccaccaaaagaagacgagctgtgtgacgattgcggtgtcggcttagtacagcgtttagatgataaggaagaaacggtccgtcaccgcctgaaagtctaccgtgagaagacccagccggtcattgactattatagtaagaaaggtattctcgcacgcgtagatgggtcgcaaggaatcgaccctgtggtggcagaagtcctggggattctgggttggagcgataag

SEQ ID NO: 1858 - protein, 231 aa, synthetic construct
  REGION 1..231: note = variant of adenylate kinase from Thermotoga neapolitana
MHHHHHHGGSGMGAYLVFLGPPGAGKGTQGRIISAKTGIPHISTGDILRDIVAKQNDEVASSIKEIMEKGELVPDELGNAVVKRRLSEKDCEKGFILDGFPRTVRQAEYLDSFLESQNRQLTAAVLIEVPEDEVVARLLSRRICPKCGRSYNMIFLPPKEDELCDDCGVGLVQRLDDKEETVRHRLKVYREKTQPVIDYYSKKGILARVDGSQGIDPVVAEVLGILGWSDK

SEQ ID NO: 1859 - DNA, 693 bp, synthetic construct
  misc_feature 1..693: note = variant of adenylate kinase from Thermotoga neapolitana
  source 1..693: mol_type = other DNA
atgcaccatcatcaccatcacgggggctccggcatgggggcatatctggtgttcttaggtccgccgggcgcgggaaaaggtacccaaggccgtattatttcggcaaagactggcatcccgcatattagcacgggcgatatcctgcgtgacatcgtcgctaagcaaaacgatgaagttgcctcgagcattaaagagatcatggagaaaggtgaactcgttccagatgaactgggtaatgcggtagtaaaacgccgcctgtcggagaaagactgcgaaaaaggctttattttggatggtttcccgcgtaccgtgcgccaagcggaatatctggatagttttcttgaaagccagaatcgccagttgacagccgccgtgctgattgaggtccccgaagatgaagttgttgcacgtctgctgtctcgcctgggttgtccgaaatgcgggcgtagttacaacatgattttcctgccaccaaaagaagacgagctgtgtgacgattgcggtgtcggcttagtacagcgtttagatgataaggaagaaacggtccgtcaccgcctgaaagtctaccgtgagaagacccagccggtcattgactattatagtaagaaaggtctgctcaaacgcgtagatgggtcgcaaggaatcgaccctgtgcctgcagaagtcctggggattctgggttggagcgataag

SEQ ID NO: 1860 - protein, 231 aa, synthetic construct
  REGION 1..231: note = variant of adenylate kinase from Thermotoga neapolitana
MHHHHHHGGSGMGAYLVFLGPPGAGKGTQGRIISAKTGIPHISTGDILRDIVAKQNDEVASSIKEIMEKGELVPDELGNAVVKRRLSEKDCEKGFILDGFPRTVRQAEYLDSFLESQNRQLTAAVLIEVPEDEVVARLLSRLGCPKCGRSYNMIFLPPKEDELCDDCGVGLVQRLDDKEETVRHRLKVYREKTQPVIDYYSKKGLLKRVDGSQGIDPVPAEVLGILGWSDK

SEQ ID NO: 1861 - DNA, 693 bp, synthetic construct
  misc_feature 1..693: note = variant of adenylate kinase from Thermotoga neapolitana
  source 1..693: mol_type = other DNA
atgcaccatcatcaccatcacgggggctccggcatgggggcatatctggtgttcttaggtccgccgggcgcgggaaaaggtacccaaggccgtattatttcggcaaagactggcatcccgcatattagcacgggcgatatcctgcgtgacatcgtcgctaagcaaaacgatgaagttgcctcgagcattaaagagatcatggagaaaggtgaactcgttccagatgaactgggtaatgcggtagtaaaacgccgcctgtcggagaaagactgcgaaaaaggctttattttggatggtttcccgcgtaccgtgcgccaagcggaatatctggatagttttcttgaaagccagaatcgccagttgacagccgccgtgctgattgaggtccccgaagatgaagttgttgcacgtctgctgtctcgcctgggttgtccgaaatgcgggcgtagttacaacatgatttttctgccaccaaaagaagacgagctgtgtgacgattgcggtgtcggcttagtacagcgtttagatgataaggaagaaacggtccgtcaccgcctgaaagtctaccgtgagaagacccagccggtcattgactattatagtaagaaaggtattctcaaacgcgtagatgggcgcctgggaatcgaccctgtggtggcagaagtcctggggattctgggttggagcgataag

SEQ ID NO: 1862 - protein, 231 aa, synthetic construct
  REGION 1..231: note = variant of adenylate kinase from Thermotoga neapolitana
MHHHHHHGGSGMGAYLVFLGPPGAGKGTQGRIISAKTGIPHISTGDILRDIVAKQNDEVASSIKEIMEKGELVPDELGNAVVKRRLSEKDCEKGFILDGFPRTVRQAEYLDSFLESQNRQLTAAVLIEVPEDEVVARLLSRLGCPKCGRSYNMIFLPPKEDELCDDCGVGLVQRLDDKEETVRHRLKVYREKTQPVIDYYSKKGILKRVDGRLGIDPVVAEVLGILGWSDK

SEQ ID NO: 1863 - DNA, 693 bp, synthetic construct
  misc_feature 1..693: note = variant of adenylate kinase from Thermotoga neapolitana
  source 1..693: mol_type = other DNA
atgcaccatcatcaccatcacgggggctccggcatgggggcatatctggtgttcttaggtccgccgggcgcgggaaaaggtacccaaggccgtattatttcggcaaagactggcatcccgcatattagcacgggcgatatcctgcgtgacatcgtcgctaagcaaaacgatgaagttgcctcgagcattaaagagatcatggagaaaggtgaactcgttccagatgaactgggtaatgcggtagtaaaacgccgcctgtcggagaaagactgcgaaaaaggctttattttggatggtttcccgcgtaccgtgcgccaagcggaatatctggatagttttcttgaaagccagaatcgccagttgacagccgccgtgctgcctgaggtccccgaagatgaagttgttgcacgtctgctgtctcgcctgatctgtccgaaatgcgggcgtagttacaacatgatttttctgccaccaaaagaagacgagctgtgtgacgattgcggtgtcggcttagtacagcgtttagatgataaggaagaaacggtccgtcaccgcctgaaagtctaccgtgagaagacccagccggtcattgactattatagtaagaaaggtattctcctgcgcgtagatgggtcgcaaggaatcgaccctatcgtggcagaagtcctggggattctgggttggagcgataag

SEQ ID NO: 1864 - protein, 231 aa, synthetic construct
  REGION 1..231: note = variant of adenylate kinase from Thermotoga neapolitana
MHHHHHHGGSGMGAYLVFLGPPGAGKGTQGRIISAKTGIPHISTGDILRDIVAKQNDEVASSIKEIMEKGELVPDELGNAVVKRRLSEKDCEKGFILDGFPRTVRQAEYLDSFLESQNRQLTAAVLPEVPEDEVVARLLSRLICPKCGRSYNMIFLPPKEDELCDDCGVGLVQRLDDKEETVRHRLKVYREKTQPVIDYYSKKGILLRVDGSQGIDPIVAEVLGILGWSDK

SEQ ID NO: 1865 - DNA, 693 bp, synthetic construct
  misc_feature 1..693: note = variant of adenylate kinase from Thermotoga neapolitana
  source 1..693: mol_type = other DNA
atgcaccatcatcaccatcacgggggctccggcatgggggcatatctggtgttcttaggtccgccgggcgcgggaaaaggtacccaaggccgtattatttcggcaaagactggcatcccgcatattagcacgggcgatatcctgcgtgacatcgtcgctaagcaaaacgatgaagttgcctcgagcattaaagagatcatggaaaaaggtgaactcgttccagatgaactgggtaatgcggtagtaaaacgccgcctgtcggagaaagactgcgaaaaaggctttattttggatggtttcccgcgtaccgtgcgccaagcggaatatctggatagttttcttgaaagccagaatcgccagttgacagccgccgtgctgattgaggtccccgaagatgaagttgttgcacgtctgctgtctcgccgtatctgtccgaaatgcgggcgtagttacaacatgatttttctgccaccaaaagaagacgagctgtgtgacgattgcggtgtcggcttagtacagcgtttagatgataaggaagaaacggtccgtcaccgcctgaaagtctaccgtgagaagacccagccggtcattgactattatagtaagaaaggtattctcaaacgcgtagatgggtcgcaaggaatcgaccctgtggtggcagaagtcctggggattctgggttggagcgataag

SEQ ID NO: 1866 - protein, 231 aa, synthetic construct
  REGION 1..231: note = variant of adenylate kinase from Thermotoga neapolitana
MHHHHHHGGSGMGAYLVFLGPPGAGKGTQGRIISAKTGIPHISTGDILRDIVAKQNDEVASSIKEIMEKGELVPDELGNAVVKRRLSEKDCEKGFILDGFPRTVRQAEYLDSFLESQNRQLTAAVLIEVPEDEVVARLLSRRICPKCGRSYNMIFLPPKEDELCDDCGVGLVQRLDDKEETVRHRLKVYREKTQPVIDYYSKKGILKRVDGSQGIDPVVAEVLGILGWSDK

SEQ ID NO: 1867 - DNA, 693 bp, synthetic construct
  misc_feature 1..693: note = variant of adenylate kinase from Thermotoga neapolitana
  source 1..693: mol_type = other DNA
atgcaccatcatcaccatcacgggggctccggcatgggggcatatctggtgttcttaggtccgccgggcgcgggaaaaggtacccaaggccgtattatttcggcaaagactggcatcccgcatattagcacgggcgatatcctgcgtgacatcgtcgctaagcaaaacgatgaagttgcctcgagcattaaagagatcatggagaaaggtgaactcgttccagatgaactgggtaatgcggtagtaaaacgccgcctgtcggagaaagactgcgaaaaaggctttattttggatggtttcccgcgtaccgtgcgccaagcggaatatctggatagttttcttgaaagccagaatcgccagttgacagccgccgtgctgcctgaggtccccgaagatgaagttgttgcacgtctgctgtctcgcctgatctgtccgaaatgcgggcgtagttacaacatgatttttctgccaccaaaagaagacgagctgtgtgacgattgcggtgtcggcttagtacagcgtttagatgataaggaagaaacggtccgtcaccgcctgaaagtctaccgtgagaagacccagccggtcattgactattatagtaagaaaggtattctcaaacgcgtagatgggtcgcaaggaatcccacctatcgtggcagaagtcctggggattctgggttggagcgataag

SEQ ID NO: 1868 - protein, 231 aa, synthetic construct
  REGION 1..231: note = variant of adenylate kinase from Thermotoga neapolitana
MHHHHHHGGSGMGAYLVFLGPPGAGKGTQGRIISAKTGIPHISTGDILRDIVAKQNDEVASSIKEIMEKGELVPDELGNAVVKRRLSEKDCEKGFILDGFPRTVRQAEYLDSFLESQNRQLTAAVLPEVPEDEVVARLLSRLICPKCGRSYNMIFLPPKEDELCDDCGVGLVQRLDDKEETVRHRLKVYREKTQPVIDYYSKKGILKRVDGSQGIPPIVAEVLGILGWSDK

SEQ ID NO: 1869 - DNA, 693 bp, synthetic construct
  misc_feature 1..693: note = variant of adenylate kinase from Thermotoga neapolitana
  source 1..693: mol_type = other DNA
atgcaccatcatcaccatcacgggggctccggcatgggggcatatctggtgttcttaggtccgccgggcgcgggaaaaggtacccaaggccgtattatttcggcaaagactggcatcccgcatattagcacgggcgatatcctgcgtgacatcgtcgctaagcaaaacgatgaagttgcctcgagcattaaagagatcatggaaaaaggtgaactcgttccagatgaactgggtaatgcggtagtaaaacgccgcctgtcggagaaagactgcgaaaaaggctttattttggatggtttcccgcgtaccgtgcgccaagcggaatatctggatagttttcttgaaagccagaatcgccagttgacagccgccgtgctgcctgaggtccccgaagatgaagttgttgcacgtctgctgtctcgccgtatctgtccgaaatgcgggcgtagtgccaacatgatttttctgccaccaaaagaagacgagctgtgtgacgattgcggtgtcggcttagtacagcgtttagatgataaggaagaaacggtccgtcaccgcctgaaagtctaccgtgagaagacccagccggtcattgactattatagtaagaaaggtattctcgcacgcgtagatgggtcgcaaggaatcgaccctatcgtggcagaagtcctggggattctgggttggagcgataag

SEQ ID NO: 1870 - protein, 231 aa, synthetic construct
  REGION 1..231: note = variant of adenylate kinase from Thermotoga neapolitana
MHHHHHHGGSGMGAYLVFLGPPGAGKGTQGRIISAKTGIPHISTGDILRDIVAKQNDEVASSIKEIMEKGELVPDELGNAVVKRRLSEKDCEKGFILDGFPRTVRQAEYLDSFLESQNRQLTAAVLPEVPEDEVVARLLSRRICPKCGRSANMIFLPPKEDELCDDCGVGLVQRLDDKEETVRHRLKVYREKTQPVIDYYSKKGILARVDGSQGIDPIVAEVLGILGWSDK

SEQ ID NO: 1871 - DNA, 693 bp, synthetic construct
  misc_feature 1..693: note = variant of adenylate kinase from Thermotoga neapolitana
  source 1..693: mol_type = other DNA
atgcaccatcatcaccatcacgggggctccggcatgggggcatatctggtgttcttaggtccgccgggcgcgggaaaaggtacccaaggccgtattatttcggcaaagactggcatcccgcatattagcacgggcgatatcctgcgtgacatcgtcgctaagcaaaacgatgaagttgcctcgagcattaaagagatcatggagaaaggtgaactcgttccagatgaactgggtaatgcggtagtaaaacgccgcctgtcggagaaagactgcgaaaaaggctttattttggatggtttcccgcgtaccgtgcgccaagcggaatatctggatagttttcttgaaagccagaatcgccagttgacagccgccgtgctgattgaggtccccgaagatgaagttgttgcacgtctgctgtctcgcctgagttgtccgaaatgcgggcgtagttacaacatgatttttctgccaccaaaagaagacgagctgtgtgacgattgcggtgtcggcttagtacagcgtttagatgataaggaagaaacggtccgtcaccgcctgaaagtctaccgtgagaagacccagccggtcattgactattatagtaagaaaggtctgctcaaacgcgtagatgggtcgcaaggaatcgaccctgtgcctgcagaagtcctggggattctgggtcgtagcgataag

SEQ ID NO: 1872 - protein, 231 aa, synthetic construct
  REGION 1..231: note = variant of adenylate kinase from Thermotoga neapolitana
MHHHHHHGGSGMGAYLVFLGPPGAGKGTQGRIISAKTGIPHISTGDILRDIVAKQNDEVASSIKEIMEKGELVPDELGNAVVKRRLSEKDCEKGFILDGFPRTVRQAEYLDSFLESQNRQLTAAVLIEVPEDEVVARLLSRLSCPKCGRSYNMIFLPPKEDELCDDCGVGLVQRLDDKEETVRHRLKVYREKTQPVIDYYSKKGLLKRVDGSQGIDPVPAEVLGILGRSDK

SEQ ID NO: 1873 - DNA, 693 bp, synthetic construct
  misc_feature 1..693: note = variant of adenylate kinase from Thermotoga neapolitana
  source 1..693: mol_type = other DNA
atgcaccatcatcaccatcacgggggctccggcatgggggcatatctggtgttcttaggtccgccgggcgcgggaaaaggtacccaaggccgtattatttcggcaaagactggcatcccgcatattagcacgggcgatatcctgcgtgacatcgtcgctaagcaaaacgatgaagttgcctcgagcattaaagagatcatggagaaaggtgaactcgttccagatgaactgggtaatgcggtagtaaaacgccgcctgtcggagaaagactgcgaaaaaggctttattttggatggtttcccgcgtaccgtgcgccaagcggaatatctggatagttttcttgaaagccagaatcgccagttgacagccgccgtgctgattgaggtccccgaagatgaagttgttgcacgtctgctgtctcgcctgatctgtccgaaatgcgggcgtagttacaacatgatttttctgccaccaaaagaagacgagctgtgtgacgattgcggtgtcggcttagtacagcgtttagatgataaggaagaaacggtccgtcaccgcctgaaagtctaccgtgagaagacccagccggtcattgactattatagtaagaaaggtctgctcaaacgcgtagatgggagcctgggaatcgaccctgtggtggcagaagtcctggggattctgggtcgtagcgataag

SEQ ID NO: 1874 - protein, 231 aa, synthetic construct
  REGION 1..231: note = variant of adenylate kinase from Thermotoga neapolitana
MHHHHHHGGSGMGAYLVFLGPPGAGKGTQGRIISAKTGIPHISTGDILRDIVAKQNDEVASSIKEIMEKGELVPDELGNAVVKRRLSEKDCEKGFILDGFPRTVRQAEYLDSFLESQNRQLTAAVLIEVPEDEVVARLLSRLICPKCGRSYNMIFLPPKEDELCDDCGVGLVQRLDDKEETVRHRLKVYREKTQPVIDYYSKKGLLKRVDGSLGIDPVVAEVLGILGRSDK

SEQ ID NO: 1875 - DNA, 693 bp, synthetic construct
  misc_feature 1..693: note = variant of adenylate kinase from Thermotoga neapolitana
  source 1..693: mol_type = other DNA
atgcaccatcatcaccatcacgggggctccggcatgggggcatatctggtgttcttaggtccgccgggcgcgggaaaaggtacccaaggccgtattatttcggcaaagactggcatcccgcatattagcacgggcgatatcctgcgtgacatcgtcgctaagcaaaacgatgaagttgcctcgagcattaaagagatcatggagaaaggtgaactcgttccagatgaactgggtaatgcggtagtaaaacgccgcctgtcggagaaagactgcgaaaaaggctttattttggatggtttcccgcgtaccgtgcgccaagcggaatatctggatagttttcttgaaagccagaatcgccagttgacagccgccgtgctgattgaggtccccgaagatgaagttgttgcacgtctgctgtctcgcctgggttgtccgaaatgcgggcgtagttacaacatgatttttctgccaccaaaagaagacgagctgtgtgacgattgcggtgtcggcttagtacagcgtttagatgataaggaagaaacggtccgtcaccgcctgaaagtctaccgtgagaagacccagccggtcattgactattatagtaagaaaggtattctcaaacgcgtagatgggtcgcaaggaatcgaccctgtgcctgcagaagtcctggggattctgggttggagcgataag

SEQ ID NO: 1876 - protein, 231 aa, synthetic construct
  REGION 1..231: note = variant of adenylate kinase from Thermotoga neapolitana
MHHHHHHGGSGMGAYLVFLGPPGAGKGTQGRIISAKTGIPHISTGDILRDIVAKQNDEVASSIKEIMEKGELVPDELGNAVVKRRLSEKDCEKGFILDGFPRTVRQAEYLDSFLESQNRQLTAAVLIEVPEDEVVARLLSRLGCPKCGRSYNMIFLPPKEDELCDDCGVGLVQRLDDKEETVRHRLKVYREKTQPVIDYYSKKGILKRVDGSQGIDPVPAEVLGILGWSDK

SEQ ID NO: 1877 - DNA, 693 bp, synthetic construct
  misc_feature 1..693: note = variant of adenylate kinase from Thermotoga neapolitana
  source 1..693: mol_type = other DNA
atgcaccatcatcaccatcacgggggctccggcatgggggcatatctggtgttcttaggtccgccgggcgcgggaaaaggtacccaaggccgtattatttcggcaaagactggcatcccgcatattagcacgggcgatatcctgcgtgacatcgtcgctaagcaaaacgatgaagttgcctcgagcattaaagagatcatggagaaaggtgaactcgttccagatgaactgggtaatgcggtagtaaaacgccgcctgtcggagaaagactgcgaaaaaggctttattttggatggtttcccgcgtaccgtgcgccaagcggaatatctggatagttttcttgaaagccagaatcgccagttgacagccgccgtgctgattgaggtccccgaagatgaagttgttgcacgtctgctgtctcgccgtatctgtccgaaatgcgggcgtagttacaacatgatttttctgccaccaaaagaagacgagctgtgtgacgattgcggtgtcggcttagtacagcgtttagatgataaggaagaaacggtccgtcaccgcctgaaagtctaccgtgagaagacccagccggtcattgactattatagtaagaaaggtattctcctgcgcgtagatgggtcgcaaggaatcgaccctgtcgtggcagaagtcctggggattctgggttggagcgataag

SEQ ID NO: 1878 - protein, 231 aa, synthetic construct
  REGION 1..231: note = variant of adenylate kinase from Thermotoga neapolitana
MHHHHHHGGSGMGAYLVFLGPPGAGKGTQGRIISAKTGIPHISTGDILRDIVAKQNDEVASSIKEIMEKGELVPDELGNAVVKRRLSEKDCEKGFILDGFPRTVRQAEYLDSFLESQNRQLTAAVLIEVPEDEVVARLLSRRICPKCGRSYNMIFLPPKEDELCDDCGVGLVQRLDDKEETVRHRLKVYREKTQPVIDYYSKKGILLRVDGSQGIDPVVAEVLGILGWSDK

SEQ ID NO: 1879 - DNA, 693 bp, synthetic construct
  misc_feature 1..693: note = variant of adenylate kinase from Thermotoga neapolitana
  source 1..693: mol_type = other DNA
atgcaccatcatcaccatcacgggggctccggcatgggggcatatctggtgttcttaggtccgccgggcgcgggaaaaggtacccaaggccgtattatttcggcaaagactggcatcccgcatattagcacgggcgatatcctgcgtgacatcgtcgctaagcaaaacgatgaagttgcctcgagcattaaagagatcatgctgaaaggtgaactcgttccagatgaactgggtaatgcggtagtaaaacgccgcctgtcggagaaagactgcgaaaaaggctttattttggatggtttcccgcgtaccgtgcgccaagcggaatatctggatagttttcttgaaagccagaatcgccagttgacagccgccgtgctgattgaggtccccgaagatgaagttgttgcacgtctgctgtctcgcctgatctgtccgaaatgcgggcgtagtgccaacatgatttttctgccaccaaaagaagacgagctgtgtgacgattgcggtgtcggcttagtacagcgtttagatgataaggaagaaacggtccgtcaccgcctgaaagtctaccgtgagaagacccagccggtcattgactattatagtaagaaaggtattctcctgcgcgtagatgggtcgcaaggaatcgaccctgtggtggcagaagtcctggggattctgggttggagcgataag

SEQ ID NO: 1880 - protein, 231 aa, synthetic construct
  REGION 1..231: note = variant of adenylate kinase from Thermotoga neapolitana
MHHHHHHGGSGMGAYLVFLGPPGAGKGTQGRIISAKTGIPHISTGDILRDIVAKQNDEVASSIKEIMLKGELVPDELGNAVVKRRLSEKDCEKGFILDGFPRTVRQAEYLDSFLESQNRQLTAAVLIEVPEDEVVARLLSRLICPKCGRSANMIFLPPKEDELCDDCGVGLVQRLDDKEETVRHRLKVYREKTQPVIDYYSKKGILLRVDGSQGIDPVVAEVLGILGWSDK

SEQ ID NO: 1881 - DNA, 693 bp, synthetic construct
  misc_feature 1..693: note = variant of adenylate kinase from Thermotoga neapolitana
  source 1..693: mol_type = other DNA
atgcaccatcatcaccatcacgggggctccggcatgggggcatatctggtgttcttaggtccgccgggcgcgggaaaaggtacccaaggccgtattatttcggcaaagactggcatcccgcatattagcacgggcgatatcctgcgtgacatcgtcgctaagcaaaacgatgaagttgcctcgagcattaaagagatcatggagaaaggtgaactcgttccagatgaactgggtaatgcggtagtaaaacgccgcctgtcggagaaagactgcgaaaaaggctttattttggatggtttcccgcgtaccgtgcgccaagcggaatatctggatagttttcttgaaagccagaatcgccagttgacagccgccgtgctgattgaggtccccgaagatgaagttgttgcacgtctgctgtctcgcctgagttgtccgaaatgcgggcgtagttacaacatgatttttctgccaccaaaagaagacgagctgtgtgacgattgcggtgtcggcttagtacagcgtttagatgataaggaagaaacggtccgtcaccgcctgaaagtctaccgtgagaagacccagccggtcattgactattatagtaagaaaggtattctcaaacgcgtagatgggagcctgggaatcgaccctgtggtggcagaagtcctggggattctgggttggagcgataag

SEQ ID NO: 1882 - protein, 231 aa, synthetic construct
  REGION 1..231: note = variant of adenylate kinase from Thermotoga neapolitana
MHHHHHHGGSGMGAYLVFLGPPGAGKGTQGRIISAKTGIPHISTGDILRDIVAKQNDEVASSIKEIMEKGELVPDELGNAVVKRRLSEKDCEKGFILDGFPRTVRQAEYLDSFLESQNRQLTAAVLIEVPEDEVVARLLSRLSCPKCGRSYNMIFLPPKEDELCDDCGVGLVQRLDDKEETVRHRLKVYREKTQPVIDYYSKKGILKRVDGSLGIDPVVAEVLGILGWSDK

SEQ ID NO: 1883 - DNA, 693 bp, synthetic construct
  misc_feature 1..693: note = variant of adenylate kinase from Thermotoga neapolitana
  source 1..693: mol_type = other DNA
atgcaccatcatcaccatcacgggggctccggcatgggggcatatctggtgttcttaggtccgccgggcgcgggaaaaggtacccaaggccgtattatttcggcaaagactggcatcccgcatattagcacgggcgatatcctgcgtgacatcgtcgctaagcaaaacgatgaagttgcctcgagcattaaagagatcatggaaaaaggtgaactcgttccagatgaactgggtaatgcggtagtaaaacgccgcctgtcggagaaagactgcgaaaaaggctttattttggatggtttcccgcgtaccgtgcgccaagcggaatatctggatagttttcttgaaagccagaatcgccagttgacagccgccgtgctgattgaggtccccgaagatgaagttgttgcacgtctgctgtctcgccgtatctgtccgaaatgcgggcgtagtgccaacatgatttttctgccaccaaaagaagacgagctgtgtgacgattgcggtgtcggcttagtacagcgtttagatgataaggaagaaacggtccgtcaccgcctgaaagtctaccgtgagaagacccagccggtcattgactattatagtaagaaaggtattctcctgcgcgtagatgggtcgcaaggaatcgaccctgtcgtggcagaagtcctggggattctgggttggagcgataag

SEQ ID NO: 1884 - protein, 231 aa, synthetic construct
  REGION 1..231: note = variant of adenylate kinase from Thermotoga neapolitana
MHHHHHHGGSGMGAYLVFLGPPGAGKGTQGRIISAKTGIPHISTGDILRDIVAKQNDEVASSIKEIMEKGELVPDELGNAVVKRRLSEKDCEKGFILDGFPRTVRQAEYLDSFLESQNRQLTAAVLIEVPEDEVVARLLSRRICPKCGRSANMIFLPPKEDELCDDCGVGLVQRLDDKEETVRHRLKVYREKTQPVIDYYSKKGILLRVDGSQGIDPVVAEVLGILGWSDK

SEQ ID NO: 1885 - DNA, 693 bp, synthetic construct
  misc_feature 1..693: note = variant of adenylate kinase from Thermotoga neapolitana
  source 1..693: mol_type = other DNA
atgcaccatcatcaccatcacgggggctccggcatgggggcatatctggtgttcttaggtccgccgggcgcgggaaaaggtacccaaggccgtattatttcggcaaagactggcatcccgcatattagcacgggcgatatcctgcgtgacatcgtcgctaagcaaaacgatgaagttgcctcgagcattaaagagatcatggagaaaggtgaactcgttccagatgaactgggtaatgcggtagtaaaacgccgcctgtcggagaaagactgcgaaaaaggctttattttggatggtttcccgcgtaccgtgcgccaagcggaatatctggatagttttcttgaaagccagaatcgccagttgacagccgccgtgctgcctgaggtccccgaagatgaagttgttgcacgtctgctgtctcgccgtatctgtccgaaatgcgggcgtagttacaacatgatttttctgccaccaaaagaagacgagctgtgtgacgattgcggtgtcggcttagtacagcgtttagatgataaggaagaaacggtccgtcaccgcctgaaagtctaccgtgagaagacccagccggtcattgactattatagtaagaaaggtattctcctgcgcgtagatgggtcgcaaggaatcgaccctgtggtggcagaagtcctggggattctgggttggagcgataag

SEQ ID NO: 1886 - protein, 231 aa, synthetic construct
  REGION 1..231: note = variant of adenylate kinase from Thermotoga neapolitana
MHHHHHHGGSGMGAYLVFLGPPGAGKGTQGRIISAKTGIPHISTGDILRDIVAKQNDEVASSIKEIMEKGELVPDELGNAVVKRRLSEKDCEKGFILDGFPRTVRQAEYLDSFLESQNRQLTAAVLPEVPEDEVVARLLSRRICPKCGRSYNMIFLPPKEDELCDDCGVGLVQRLDDKEETVRHRLKVYREKTQPVIDYYSKKGILLRVDGSQGIDPVVAEVLGILGWSDK

SEQ ID NO: 1887 - DNA, 693 bp, synthetic construct
  misc_feature 1..693: note = variant of adenylate kinase from Thermotoga neapolitana
  source 1..693: mol_type = other DNA
atgcaccatcatcaccatcacgggggctccggcatgggggcatatctggtgttcttaggtccgccgggcgcgggaaaaggtacccaaggccgtattatttcggcaaagactggcatcccgcatattagcacgggcgatatcctgcgtgacatcgtcgctaagcaaaacgatgaagttgcctcgagcattaaagagatcatgctgaaaggtgaactcgttccagatgaactgggtaatgcggtagtaaaacgccgcctgtcggagaaagactgcgaaaaaggctttattttggatggtttcccgcgtaccgtgcgccaagcggaatatctggatagttttcttgaaagccagaatcgccagttgacagccgccgtgctgcctgaggtccccgaagatgaagttgttgcacgtctgctgtctcgccgtatctgtccgaaatgcgggcgtagttacaacatgatttttctgccaccaaaagaagacgagctgtgtgacgattgcggtgtcggcttagtacagcgtttagatgataaggaagaaacggtccgtcaccgcctgaaagtctaccgtgagaagacccagccggtcattgactattatagtaagaaaggtattctcctgcgcgtagatgggtcgcaaggaatcgaccctgtggtggcagaagtcctggggattctgggttggagcgataag

SEQ ID NO: 1888 - protein, 231 aa, synthetic construct
  REGION 1..231: note = variant of adenylate kinase from Thermotoga neapolitana
MHHHHHHGGSGMGAYLVFLGPPGAGKGTQGRIISAKTGIPHISTGDILRDIVAKQNDEVASSIKEIMLKGELVPDELGNAVVKRRLSEKDCEKGFILDGFPRTVRQAEYLDSFLESQNRQLTAAVLPEVPEDEVVARLLSRRICPKCGRSYNMIFLPPKEDELCDDCGVGLVQRLDDKEETVRHRLKVYREKTQPVIDYYSKKGILLRVDGSQGIDPVVAEVLGILGWSDK

SEQ ID NO: 1889 - DNA, 693 bp, synthetic construct
  misc_feature 1..693: note = variant of adenylate kinase from Thermotoga neapolitana
  source 1..693: mol_type = other DNA
atgcaccatcatcaccatcacgggggctccggcatgggggcatatctggtgttcttaggtccgccgggcgcgggaaaaggtacccaaggccgtattatttcggcaaagactggcatcccgcatattagcacgggcgatatcctgcgtgacatcgtcgctaagcaaaacgatgaagttgcctcgagcattaaagagatcatggagaaaggtgaactcgttccagatgaactgggtaatgcggtagtaaaacgccgcctgtcggagaaagactgcgaaaaaggctttattttggatggtttcccgcgtaccgtgcgccaagcggaatatctggatagttttcttgaaagccagaatcgccagttgacagccgccgtgctgattgaggtccccgaagatgaagttgttgcacgtctgctgtctcgcctgagttgtccgaaatgcgggcgtagttacaacatgatttttctgccaccaaaagaagacgagctgtgtgacgattgcggtgtcggcttagtacagcgtttagatgataaggaagaaacggtccgtcaccgcctgaaagtctaccgtgagaagacccagccggtcattgactattatagtaagaaaggtctgctcaaacgcgtagatgggtcgcaaggaatcgaccctgtggtggcagaagtcctggggattctgggttggagcgataag

SEQ ID NO: 1890 - protein, 231 aa, synthetic construct
  REGION 1..231: note = variant of adenylate kinase from Thermotoga neapolitana
MHHHHHHGGSGMGAYLVFLGPPGAGKGTQGRIISAKTGIPHISTGDILRDIVAKQNDEVASSIKEIMEKGELVPDELGNAVVKRRLSEKDCEKGFILDGFPRTVRQAEYLDSFLESQNRQLTAAVLIEVPEDEVVARLLSRLSCPKCGRSYNMIFLPPKEDELCDDCGVGLVQRLDDKEETVRHRLKVYREKTQPVIDYYSKKGLLKRVDGSQGIDPVVAEVLGILGWSDK

SEQ ID NO: 1891 - DNA, 693 bp, synthetic construct
  misc_feature 1..693: note = variant of adenylate kinase from Thermotoga neapolitana
  source 1..693: mol_type = other DNA
atgcaccatcatcaccatcacgggggctccggcatgggggcatatctggtgttcttaggtccgccgggcgcgggaaaaggtacccaaggccgtattatttcggcaaagactggcatcccgcatattagcacgggcgatatcctgcgtgacatcgtcgctaagcaaaacgatgaagttgcctcgagcattaaagagatcatgctgaaaggtgaactcgttccagatgaactgggtaatgcggtagtaaaacgccgcctgtcggagaaagactgcgaaaaaggctttattttggatggtttcccgcgtaccgtgcgccaagcggaatatctggatagttttcttgaaagccagaatcgccagttgacagccgccgtgctgcctgaggtccccgaagatgaagttgttgcacgtctgctgtctcgcctgatctgtccgaaatgcgggcgtagttacaacatgatttttctgccaccaaaagaagacgagctgtgtgacgattgcggtgtcggcttagtacagcgtttagatgataaggaagaaacggtccgtcaccgcctgaaagtctaccgtgagaagacccagccggtcattgactattatagtaagaaaggtattctcaaacgcgtagatgggtcgcaaggaatcgaccctgtggtggcagaagtcctggggattctgggttggagcgataag

SEQ ID NO: 1892 - protein, 231 aa, synthetic construct
  REGION 1..231: note = variant of adenylate kinase from Thermotoga neapolitana
MHHHHHHGGSGMGAYLVFLGPPGAGKGTQGRIISAKTGIPHISTGDILRDIVAKQNDEVASSIKEIMLKGELVPDELGNAVVKRRLSEKDCEKGFILDGFPRTVRQAEYLDSFLESQNRQLTAAVLPEVPEDEVVARLLSRLICPKCGRSYNMIFLPPKEDELCDDCGVGLVQRLDDKEETVRHRLKVYREKTQPVIDYYSKKGILKRVDGSQGIDPVVAEVLGILGWSDK

SEQ ID NO: 1893 - DNA, 693 bp, synthetic construct
  misc_feature 1..693: note = variant of adenylate kinase from Thermotoga neapolitana
  source 1..693: mol_type = other DNA
atgcaccatcatcaccatcacgggggctccggcatgggggcatatctggtgttcttaggtccgccgggcgcgggaaaaggtacccaaggccgtattatttcggcaaagactggcatcccgcatattagcacgggcgatatcctgcgtgacatcgtcgctaagcaaaacgatgaagttgcctcgagcattaaagagatcatggaaaaaggtgaactcgttccagatgaactgggtaatgcggtagtaaaacgccgcctgtcggagaaagactgcgaaaaaggctttattttggatggtttcccgcgtaccgtgcgccaagcggaatatctggatagttttcttgaaagccagaatcgccagttgacagccgccgtgctgattgaggtccccgaagatgaagttgttgcacgtctgctgtctcgcctgatctgtccgaaatgcgggcgtagttacaacatgatttttctgccaccaaaagaagacgagctgtgtgacgattgcggtgtcggcttagtacagcgtttagatgataaggaagaaacggtccgtcaccgcctgaaagtctaccgtgagaagacccagccggtcattgactattatagtaagaaaggtattctcaaacgcgtagatgggtcgcaaggaatcgaccctgccgtggcagaagtcctggggattctgggttggagcgataag

SEQ ID NO: 1894 - protein, 231 aa, synthetic construct
  REGION 1..231: note = variant of adenylate kinase from Thermotoga neapolitana
MHHHHHHGGSGMGAYLVFLGPPGAGKGTQGRIISAKTGIPHISTGDILRDIVAKQNDEVASSIKEIMEKGELVPDELGNAVVKRRLSEKDCEKGFILDGFPRTVRQAEYLDSFLESQNRQLTAAVLIEVPEDEVVARLLSRLICPKCGRSYNMIFLPPKEDELCDDCGVGLVQRLDDKEETVRHRLKVYREKTQPVIDYYSKKGILKRVDGSQGIDPAVAEVLGILGWSDK

SEQ ID NO: 1895 - DNA, 693 bp, synthetic construct
  misc_feature 1..693: note = variant of adenylate kinase from Thermotoga neapolitana
  source 1..693: mol_type = other DNA
atgcaccatcatcaccatcacgggggctccggcatgggggcatatctggtgttcttaggtccgccgggcgcgggaaaaggtacccaaggccgtattatttcggcaaagactggcatcccgcatattagcacgggcgatatcctgcgtgacatcgtcgctaagcaaaacgatgaagttgcctcgagcattaaagagatcatggaaaaaggtgaactcgttccagatgaactgggtaatgcggtagtaaaacgccgcctgtcggagaaagactgcgaaaaaggctttattttggatggtttcccgcgtaccgtgcgccaagcggaatatctggatagttttcttgaaagccagaatcgccagttgacagccgccgtgctgcctgaggtccccgaagatgaagttgttgcacgtctgctgtctcgccgtatctgtccgaaatgcgggcgtagttacaacatgatttttctgccaccaaaagaagacgagctgtgtgacgattgcggtgtcggcttagtacagcgtttagatgataaggaagaaacggtccgtcaccgcctgaaagtctaccgtgagaagacccagccgatcattgactattatagtaagaaaggtattctcaaacgcgtagatgggtcgcaaggaatcgaccctgtggtggcagaagtcctggggattctgggttggagcgataag

SEQ ID NO: 1896 - protein, 231 aa, synthetic construct
  REGION 1..231: note = variant of adenylate kinase from Thermotoga neapolitana
MHHHHHHGGSGMGAYLVFLGPPGAGKGTQGRIISAKTGIPHISTGDILRDIVAKQNDEVASSIKEIMEKGELVPDELGNAVVKRRLSEKDCEKGFILDGFPRTVRQAEYLDSFLESQNRQLTAAVLPEVPEDEVVARLLSRRICPKCGRSYNMIFLPPKEDELCDDCGVGLVQRLDDKEETVRHRLKVYREKTQPIIDYYSKKGILKRVDGSQGIDPVVAEVLGILGWSDK

SEQ ID NO: 1897 - DNA, 693 bp, synthetic construct
  misc_feature 1..693: note = variant of adenylate kinase from Thermotoga neapolitana
  source 1..693: mol_type = other DNA
atgcaccatcatcaccatcacgggggctccggcatgggggcatatctggtgttcttaggtccgccgggcgcgggaaaaggtacccaaggccgtattatttcggcaaagactggcatcccgcatattagcacgggcgatatcctgcgtgacatcgtcgctaagcaaaacgatgaagttgcctcgagcattaaagagatcatggaaaaaggtgaactcgttccagatgaactgggtaatgcggtagtaaaacgccgcctgtcggagaaagactgcgaaaaaggctttattttggatggtttcccgcgtaccgtgcgccaagcggaatatctggatagttttcttgaaagccagaatcgccagttgacagccgccgtgctgattgaggtccccgaagatgaagttgttgcacgtctgctgtctcgccgtatctgtccgaaatgcgggcgtagttacaacatgatttttctgccaccaaaagaagacgagctgtgtgacgattgcggtgtcggcttagtacagcgtttagatgataaggaagaaacggtccgtcaccgcctgaaagtctaccgtgagaagacccagccggtcattgactattatagtaagaaaggtattctcctgcgcgtagatgggtcgcaaggaatcgaccctgccgtggcagaagtcctggggattctgggttggagcgataag

SEQ ID NO: 1898 - protein, 231 aa, synthetic construct
  REGION 1..231: note = variant of adenylate kinase from Thermotoga neapolitana
MHHHHHHGGSGMGAYLVFLGPPGAGKGTQGRIISAKTGIPHISTGDILRDIVAKQNDEVASSIKEIMEKGELVPDELGNAVVKRRLSEKDCEKGFILDGFPRTVRQAEYLDSFLESQNRQLTAAVLIEVPEDEVVARLLSRRICPKCGRSYNMIFLPPKEDELCDDCGVGLVQRLDDKEETVRHRLKVYREKTQPVIDYYSKKGILLRVDGSQGIDPAVAEVLGILGWSDK

SEQ ID NO: 1899 - DNA, 693 bp, synthetic construct
  misc_feature 1..693: note = variant of adenylate kinase from Thermotoga neapolitana
  source 1..693: mol_type = other DNA
atgcaccatcatcaccatcacgggggctccggcatgggggcatatctggtgttcttaggtccgccgggcgcgggaaaaggtacccaaggccgtattatttcggcaaagactggcatcccgcatattagcacgggcgatatcctgcgtgacatcgtcgctaagcaaaacgatgaagttgcctcgagcattaaagagatcatggagaaaggtgaactcgttccagatgaactgggtaatgcggtagtaaaacgccgcctgtcggagaaagactgcgaaaaaggctttattttggatggtttcccgcgtaccgtgcgccaagcggaatatctggatagttttcttgaaagccagaatcgccagttgacagccgccgtgctgattgaggtccccgaagatgaagttgttgcacgtctgctgtctcgcctgagttgtccgaaatgcgggcgtagttacaacatgattgcactgccaccaaaagaagacgagctgtgtgacgattgcggtgtcggcttagtacagcgtttagatgataaggaagaaacggtccgtcaccgcctgaaagtctaccgtgagaagacccagccggtcattgactattatagtaagaaaggtattctcaaacgcgtagatgggagccagggaatcgaccctgtggtggcagaagtcctggggattctgggttggagcgataag

SEQ ID NO: 1900 - protein, 231 aa, synthetic construct
  REGION 1..231: note = variant of adenylate kinase from Thermotoga neapolitana
MHHHHHHGGSGMGAYLVFLGPPGAGKGTQGRIISAKTGIPHISTGDILRDIVAKQNDEVASSIKEIMEKGELVPDELGNAVVKRRLSEKDCEKGFILDGFPRTVRQAEYLDSFLESQNRQLTAAVLIEVPEDEVVARLLSRLSCPKCGRSYNMIALPPKEDELCDDCGVGLVQRLDDKEETVRHRLKVYREKTQPVIDYYSKKGILKRVDGSQGIDPVVAEVLGILGWSDK

SEQ ID NO: 1901 - DNA, 693 bp, synthetic construct
  misc_feature 1..693: note = variant of adenylate kinase from Thermotoga neapolitana
  source 1..693: mol_type = other DNA
atgcaccatcatcaccatcacgggggctccggcatgggggcatatctggtgttcttaggtccgccgggcgcgggaaaaggtacccaaggccgtattatttcggcaaagactggcatcccgcatattagcacgggcgatatcctgcgtgacatcgtcgctaagcaaaacgatgaagttgcctcgagcattaaagagatcatggagaaaggtgaactcgttccagatgaactgggtaatgcggtagtaaaacgccgcctgtcggagaaagactgcgaaaaaggctttattttggatggtttcccgcgtaccgtgcgccaagcggaatatctggatagttttcttgaaagccagaatcgccagttgacagccgccgtgctgattgaggtccccgaagatgaagttgttgcacgtctgctgtctcgcctgagttgtccgaaatgcgggcgtagttacaacatgattttcctgccaccaaaagaagacgagctgtgtgacgattgcggtgtcggcttagtacagcgtttagatgataaggaagaaacggtccgtcaccgcctgaaagtctaccgtgagaagacccagccggtcattgactattatagtaagaaaggtattctcaaacgcgtagatgggtcgcaaggaatcgaccctgtggttgcagaagtcctggggattctgggttggagcgataag

SEQ ID NO: 1902 - protein, 231 aa, synthetic construct
  REGION 1..231: note = variant of adenylate kinase from Thermotoga neapolitana
MHHHHHHGGSGMGAYLVFLGPPGAGKGTQGRIISAKTGIPHISTGDILRDIVAKQNDEVASSIKEIMEKGELVPDELGNAVVKRRLSEKDCEKGFILDGFPRTVRQAEYLDSFLESQNRQLTAAVLIEVPEDEVVARLLSRLSCPKCGRSYNMIFLPPKEDELCDDCGVGLVQRLDDKEETVRHRLKVYREKTQPVIDYYSKKGILKRVDGSQGIDPVVAEVLGILGWSDK

SEQ ID NO: 1903 - DNA, 693 bp, synthetic construct
  misc_feature 1..693: note = variant of adenylate kinase from Thermotoga neapolitana
  source 1..693: mol_type = other DNA
atgcaccatcatcaccatcacgggggctccggcatgggggcatatctggtgttcttaggtccgccgggcgcgggaaaaggtacccaaggccgtattatttcggcaaagactggcatcccgcatattagcacgggcgatatcctgcgtgacatcgtcgctaagcaaaacgatgaagttgcctcgagcattaaagagatcatgctgaaaggtgaactcgttccagatgaactgggtaatgcggtagtaaaacgccgcctgtcggagaaagactgcgaaaaaggctttattttggatggtttcccgcgtaccgtgcgccaagcggaatatctggatagttttcttgaaagccagaatcgccagttgacagccgccgtgctgattgaggtccccgaagatgaagttgttgcacgtctgctgtctcgccgtatctgtccgaaatgcgggcgtagttacaacatgatttttctgccaccaaaagaagacgagctgtgtgacgattgcggtgtcggcttagtacagcgtttagatgataaggaagaaacggtccgtcaccgcctgaaagtctaccgtgagaagacccagccggtcattgactattatagtaagaaaggtattctcaaacgcgtagatgggtcgcaaggaatcccacctgtcgtggcagaagtcctggggattctgggttggagcgataag

SEQ ID NO: 1904 - protein, 231 aa, synthetic construct
  REGION 1..231: note = variant of adenylate kinase from Thermotoga neapolitana
MHHHHHHGGSGMGAYLVFLGPPGAGKGTQGRIISAKTGIPHISTGDILRDIVAKQNDEVASSIKEIMLKGELVPDELGNAVVKRRLSEKDCEKGFILDGFPRTVRQAEYLDSFLESQNRQLTAAVLIEVPEDEVVARLLSRRICPKCGRSYNMIFLPPKEDELCDDCGVGLVQRLDDKEETVRHRLKVYREKTQPVIDYYSKKGILKRVDGSQGIPPVVAEVLGILGWSDK

SEQ ID NO: 1905 - DNA, 693 bp, synthetic construct
  misc_feature 1..693: note = variant of adenylate kinase from Thermotoga neapolitana
  source 1..693: mol_type = other DNA
atgcaccatcatcaccatcacgggggctccggcatgggggcatatctggtgttcttaggtccgccgggcgcgggaaaaggtacccaaggccgtattatttcggcaaagactggcatcccgcatattagcacgggcgatatcctgcgtgacatcgtcgctaagcaaaacgatgaagttgcctcgagcattaaagagatcatgctgaaaggtgaactcgttccagatgaactgggtaatgcggtagtaaaacgccgcctgtcggagaaagactgcgaaaaaggctttattttggatggtttcccgcgtaccgtgcgccaagcggaatatctggatagttttcttgaaagccagaatcgccagttgacagccgccgtgctgcctgaggtccccgaagatgaagttgttgcacgtctgctgtctcgcctgatctgtccgaaatgcgggcgtagttacaacatgatttttctgccaccaaaagaagacgagctgtgtgacgattgcggtgtcggcttagtacagcgtttagatgataaggaagaaacggtccgtcaccgcctgaaagtctaccgtgagaagacccagccggtcattgactattatagtaagaaaggtattctcaaacgcgtagatgggtcgcaaggaatcccacctatcgtggcagaagtcctggggattctgggttggagcgataag

SEQ ID NO: 1906 - protein, 231 aa, synthetic construct
  REGION 1..231: note = variant of adenylate kinase from Thermotoga neapolitana
MHHHHHHGGSGMGAYLVFLGPPGAGKGTQGRIISAKTGIPHISTGDILRDIVAKQNDEVASSIKEIMLKGELVPDELGNAVVKRRLSEKDCEKGFILDGFPRTVRQAEYLDSFLESQNRQLTAAVLPEVPEDEVVARLLSRLICPKCGRSYNMIFLPPKEDELCDDCGVGLVQRLDDKEETVRHRLKVYREKTQPVIDYYSKKGILKRVDGSQGIPPIVAEVLGILGWSDK

SEQ ID NO: 1907 - DNA, 693 bp, synthetic construct
  misc_feature 1..693: note = variant of adenylate kinase from Thermotoga neapolitana
  source 1..693: mol_type = other DNA
atgcaccatcatcaccatcacgggggctccggcatgggggcatatctggtgttcttaggtccgccgggcgcgggaaaaggtacccaaggccgtattatttcggcaaagactggcatcccgcatattagcacgggcgatatcctgcgtgacatcgtcgctaagcaaaacgatgaagttgcctcgagcattaaagagatcatgctgaaaggtgaactcgttccagatgaactgggtaatgcggtagtaaaacgccgcctgtcggagaaagactgcgaaaaaggctttattttggatggtttcccgcgtaccgtgcgccaagcggaatatctggatagttttcttgaaagccagaatcgccagttgacagccgccgtgctgcctgaggtccccgaagatgaagttgttgcacgtctgctgtctcgcctgatctgtccgaaatgcgggcgtagttacaacatgatttttctgccaccaaaagaagacgagctgtgtgacgattgcggtgtcggcttagtacagcgtttagatgataaggaagaaacggtccgtcaccgcctgaaagtctaccgtgagaagacccagccggtcattgactattatagtaagaaaggtattctcaaacgcgtagatgggtcgcaaggaatcgaccctatcgtggcagaagtcctggggattctgggttggagcgataag

SEQ ID NO: 1908 - protein, 231 aa, synthetic construct
  REGION 1..231: note = variant of adenylate kinase from Thermotoga neapolitana
MHHHHHHGGSGMGAYLVFLGPPGAGKGTQGRIISAKTGIPHISTGDILRDIVAKQNDEVASSIKEIMLKGELVPDELGNAVVKRRLSEKDCEKGFILDGFPRTVRQAEYLDSFLESQNRQLTAAVLPEVPEDEVVARLLSRLICPKCGRSYNMIFLPPKEDELCDDCGVGLVQRLDDKEETVRHRLKVYREKTQPVIDYYSKKGILKRVDGSQGIDPIVAEVLGILGWSDK

SEQ ID NO: 1909 - DNA, 693 bp, synthetic construct
  misc_feature 1..693: note = variant of adenylate kinase from Thermotoga neapolitana
  source 1..693: mol_type = other DNA
atgcaccatcatcaccatcacgggggctccggcatgggggcatatctggtgttcttaggtccgccgggcgcgggaaaaggtacccaaggccgtattatttcggcaaagactggcatcccgcatattagcacgggcgatatcctgcgtgacatcgtcgctaagcaaaacgatgaagttgcctcgagcattaaagagatcatggagaaaggtgaactcgttccagatgaactgggtaatgcggtagtaaaacgccgcctgtcggagaaagactgcgaaaaaggctttattttggatggtttcccgcgtaccgtgcgccaagcggaatatctggatagttttcttgaaagccagaatcgccagttgacagccgccgtgctgattgaggtccccgaagatgaagttgttgcacgtctgctgtctcgcctgatctgtccgaaatgcgggcgtagtgccaacatgatttttctgccaccaaaagaagacgagctgtgtgacgattgcggtgtcggcttagtacagcgtttagatgataaggaagaaacggtccgtcaccgcctgaaagtctaccgtgagaagacccagccggtcattgactattatagtaagaaaggtattctcaaacgcgtagatgggtcgcaaggaatcccacctatcgtggcagaagtcctggggattctgggttggagcgataag

SEQ ID NO: 1910 - protein, 231 aa, synthetic construct
  REGION 1..231: note = variant of adenylate kinase from Thermotoga neapolitana
MHHHHHHGGSGMGAYLVFLGPPGAGKGTQGRIISAKTGIPHISTGDILRDIVAKQNDEVASSIKEIMEKGELVPDELGNAVVKRRLSEKDCEKGFILDGFPRTVRQAEYLDSFLESQNRQLTAAVLIEVPEDEVVARLLSRLICPKCGRSANMIFLPPKEDELCDDCGVGLVQRLDDKEETVRHRLKVYREKTQPVIDYYSKKGILKRVDGSQGIPPIVAEVLGILGWSDK

SEQ ID NO: 1911 - DNA, 693 bp, synthetic construct
  misc_feature 1..693: note = variant of adenylate kinase from Thermotoga neapolitana
  source 1..693: mol_type = other DNA
atgcaccatcatcaccatcacgggggctccggcatgggggcatatctggtgttcttaggtccgccgggcgcgggaaaaggtacccaaggccgtattatttcggcaaagactggcatcccgcatattagcacgggcgatatcctgcgtgacatcgtcgctaagcaaaacgatgaagttgcctcgagcattaaagagatcatggagaaaggtgaactcgttccagatgaactgggtaatgcggtagtaaaacgccgcctgtcggagaaagactgcgaaaaaggctttattttggatggtttcccgcgtaccgtgcgccaagcggaatatctggatagttttcttgaaagccagaatcgccagttgacagccgccgtgctgattgaggtccccgaagatgaagttgttgcacgtctgctgtctcgcctgagttgtccgaaatgcgggcgtagttacaacatgatttttctgccaccaaaagaagacgagctgtgtgacgattgcggtgtcggcttagtacagcgtttagatgataaggaagaaacggtccgtcaccgcctgaaagtctaccgtgagaagacccagccggtcattgactattatagtaagaaaggtattctcaaacgcgtagatgggcgccagggaatcgaccctgtggtggcagaagtcctggggattctgggtcgtagcgataag

SEQ ID NO: 1912 - protein, 231 aa, synthetic construct
  REGION 1..231: note = variant of adenylate kinase from Thermotoga neapolitana
MHHHHHHGGSGMGAYLVFLGPPGAGKGTQGRIISAKTGIPHISTGDILRDIVAKQNDEVASSIKEIMEKGELVPDELGNAVVKRRLSEKDCEKGFILDGFPRTVRQAEYLDSFLESQNRQLTAAVLIEVPEDEVVARLLSRLSCPKCGRSYNMIFLPPKEDELCDDCGVGLVQRLDDKEETVRHRLKVYREKTQPVIDYYSKKGILKRVDGRQGIDPVVAEVLGILGRSDK

SEQ ID NO: 1913 - DNA, 693 bp, synthetic construct
  misc_feature 1..693: note = variant of adenylate kinase from Thermotoga neapolitana
  source 1..693: mol_type = other DNA
atgcaccatcatcaccatcacgggggctccggcatgggggcatatctggtgttcttaggtccgccgggcgcgggaaaaggtacccaaggccgtattatttcggcaaagactggcatcccgcatattagcacgggcgatatcctgcgtgacatcgtcgctaagcaaaacgatgaagttgcctcgagcattaaagagatcatggaaaaaggtgaactcgttccagatgaactgggtaatgcggtagtaaaacgccgcctgtcggagaaagactgcgaaaaaggctttattttggatggtttcccgcgtaccgtgcgccaagcggaatatctggatagttttcttgaaagccagaatcgccagttgacagccgccgtgctgcctgaggtccccgaagatgaagttgttgcacgtctgctgtctcgccgtatctgtccgaaatgcgggcgtagtgccaacatgatttttctgccaccaaaagaagacgagctgtgtgacgattgcggtgtcggcttagtacagcgtttagatgataaggaagaaacggtccgtcaccgcctgaaagtctaccgtgagaagacccagccggtcattgactattatagtaagaaaggtattctcaaacgcgtagatgggtcgcaaggaatcgaccctgtcgtggcagaagtcctggggattctgggttggagcgataag

SEQ ID NO: 1914 - protein, 231 aa, synthetic construct
  REGION 1..231: note = variant of adenylate kinase from Thermotoga neapolitana
MHHHHHHGGSGMGAYLVFLGPPGAGKGTQGRIISAKTGIPHISTGDILRDIVAKQNDEVASSIKEIMEKGELVPDELGNAVVKRRLSEKDCEKGFILDGFPRTVRQAEYLDSFLESQNRQLTAAVLPEVPEDEVVARLLSRRICPKCGRSANMIFLPPKEDELCDDCGVGLVQRLDDKEETVRHRLKVYREKTQPVIDYYSKKGILKRVDGSQGIDPVVAEVLGILGWSDK

SEQ ID NO: 1915 - DNA, 693 bp, synthetic construct
  misc_feature 1..693: note = variant of adenylate kinase from Thermotoga neapolitana
  source 1..693: mol_type = other DNA
atgcaccatcatcaccatcacgggggctccggcatgggggcatatctggtgttcttaggtccgccgggcgcgggaaaaggtacccaaggccgtattatttcggcaaagactggcatcccgcatattagcacgggcgatatcctgcgtgacatcgtcgctaagcaaaacgatgaagttgcctcgagcattaaagagatcatggaaaaaggtgaactcgttccagatgaactgggtaatgcggtagtaaaacgccgcctgtcggagaaagactgcgaaaaaggctttattttggatggtttcccgcgtaccgtgcgccaagcggaatatctggatagttttcttgaaagccagaatcgccagttgacagccgccgtgctgattgaggtccccgaagatgaagttgttgcacgtctgctgtctcgcctgatctgtccgaaatgcgggcgtagtgccaacatgatttttctgccaccaaaagaagacgagctgtgtgacgattgcggtgtcggcttagtacagcgtttagatgataaggaagaaacggtccgtcaccgcctgaaagtctaccgtgagaagacccagccggtcattgactattatagtaagaaaggtattctcctgcgcgtagatgggtcgcaaggaatcgaccctgtggtggcagaagtcctggggattctgggttggagcgataag

SEQ ID NO: 1916 - protein, 231 aa, synthetic construct
  REGION 1..231: note = variant of adenylate kinase from Thermotoga neapolitana
MHHHHHHGGSGMGAYLVFLGPPGAGKGTQGRIISAKTGIPHISTGDILRDIVAKQNDEVASSIKEIMEKGELVPDELGNAVVKRRLSEKDCEKGFILDGFPRTVRQAEYLDSFLESQNRQLTAAVLIEVPEDEVVARLLSRLICPKCGRSANMIFLPPKEDELCDDCGVGLVQRLDDKEETVRHRLKVYREKTQPVIDYYSKKGILLRVDGSQGIDPVVAEVLGILGWSDK

SEQ ID NO: 1917 - DNA, 693 bp, synthetic construct
  misc_feature 1..693: note = variant of adenylate kinase from Thermotoga neapolitana
  source 1..693: mol_type = other DNA
atgcaccatcatcaccatcacgggggctccggcatgggggcatatctggtgttcttaggtccgccgggcgcgggaaaaggtacccaaggccgtattatttcggcaaagactggcatcccgcatattagcacgggcgatatcctgcgtgacatcgtcgctaagcaaaacgatgaagttgcctcgagcattaaagagatcatggaaaaaggtgaactcgttccagatgaactgggtaatgcggtagtaaaacgccgcctgtcggagaaagactgcgaaaaaggctttattttggatggtttcccgcgtaccgtgcgccaagcggaatatctggatagttttcttgaaagccagaatcgccagttgacagccgccgtgctgcctgaggtccccgaagatgaagttgttgcacgtctgctgtctcgccgtatctgtccgaaatgcgggcgtagttacaacatgatttttctgccaccaaaagaagacgagctgtgtgacgattgcggtgtcggcttagtacagcgtttagatgataaggaagaaacggtccgtcaccgcctgaaagtctaccgtgagaagacccagccggtcattgactattatagtaagaaaggtattctcaaacgcgtagatgggtcgcaaggaatcccacctgtcgtggcagaagtcctggggattctgggttggagcgataag

SEQ ID NO: 1918 - protein, 231 aa, synthetic construct
  REGION 1..231: note = variant of adenylate kinase from Thermotoga neapolitana
MHHHHHHGGSGMGAYLVFLGPPGAGKGTQGRIISAKTGIPHISTGDILRDIVAKQNDEVASSIKEIMEKGELVPDELGNAVVKRRLSEKDCEKGFILDGFPRTVRQAEYLDSFLESQNRQLTAAVLPEVPEDEVVARLLSRRICPKCGRSYNMIFLPPKEDELCDDCGVGLVQRLDDKEETVRHRLKVYREKTQPVIDYYSKKGILKRVDGSQGIPPVVAEVLGILGWSDK

SEQ ID NO: 1919 - DNA, 693 bp, synthetic construct
  misc_feature 1..693: note = variant of adenylate kinase from Thermotoga neapolitana
  source 1..693: mol_type = other DNA
atgcaccatcatcaccatcacgggggctccggcatgggggcatatctggtgttcttaggtccgccgggcgcgggaaaaggtacccaaggccgtattatttcggcaaagactggcatcccgcatattagcacgggcgatatcctgcgtgacatcgtcgctaagcaaaacgatgaagttgcctcgagcattaaagagatcatggaaaaaggtgaactcgttccagatgaactgggtaatgcggtagtaaaacgccgcctgtcggagaaagactgcgaaaaaggctttattttggatggtttcccgcgtaccgtgcgccaagcggaatatctggatagttttcttgaaagccagaatcgccagttgacagccgccgtgctgattgagatccccgaagatgaagttgttgcacgtctgctgtctcgcctgatctgtccgaaatgcgggcgtagttacaacatgatttttctgccaccaaaagaagacgagctgtgtgacgattgcggtgtcggcttagtacagcgtttagatgataaggaagaaacggtccgtcaccgcctgaaagtctaccgtgagaagacccagccggtcattgactattatagtaagaaaggtattctcgcacgcgtagatgggtcgcaaggaatcgaccctgccgtggcagaagtcctggggattctgggttggagcgataag

SEQ ID NO: 1920 - protein, 231 aa, synthetic construct
  REGION 1..231: note = variant of adenylate kinase from Thermotoga neapolitana
MHHHHHHGGSGMGAYLVFLGPPGAGKGTQGRIISAKTGIPHISTGDILRDIVAKQNDEVASSIKEIMEKGELVPDELGNAVVKRRLSEKDCEKGFILDGFPRTVRQAEYLDSFLESQNRQLTAAVLIEIPEDEVVARLLSRLICPKCGRSYNMIFLPPKEDELCDDCGVGLVQRLDDKEETVRHRLKVYREKTQPVIDYYSKKGILARVDGSQGIDPAVAEVLGILGWSDK

SEQ ID NO: 1921 - DNA, 693 bp, synthetic construct
  misc_feature 1..693: note = variant of adenylate kinase from Thermotoga neapolitana
  source 1..693: mol_type = other DNA
atgcaccatcatcaccatcacgggggctccggcatgggggcatatctggtgttcttaggtccgccgggcgcgggaaaaggtacccaaggccgtattatttcggcaaagactggcatcccgcatattagcacgggcgatatcctgcgtgacatcgtcgctaagcaaaacgatgaagttgcctcgagcattaaagagatcatggaaaaaggtgaactcgttccagatgaactgggtaatgcggtagtaaaacgccgcctgtcggagaaagactgcgaaaaaggctttattttggatggtttcccgcgtaccgtgcgccaagcggaatatctggatagttttcttgaaagccagaatcgccagttgacagccgccgtgctgattgaggtccccgaagatgaagttgttgcacgtctgctgtctcgccgtatctgtccgaaatgcgggcgtagttacaacatgatttttctgccaccaaaagaagacgagctgtgtgacgattgcggtgtcggcttagtacagcgtttagatgataaggaagaaacggtccgtcaccgcctgaaagtctaccgtgagaagacccagccggtcattgactattatagtaagaaaggtattctcctgcgcgtagatgggtcgcaaggaatcgaccctatcgtggcagaagtcctggggattctgggttggagcgataag

SEQ ID NO: 1922 - protein, 231 aa, synthetic construct
  REGION 1..231: note = variant of adenylate kinase from Thermotoga neapolitana
MHHHHHHGGSGMGAYLVFLGPPGAGKGTQGRIISAKTGIPHISTGDILRDIVAKQNDEVASSIKEIMEKGELVPDELGNAVVKRRLSEKDCEKGFILDGFPRTVRQAEYLDSFLESQNRQLTAAVLIEVPEDEVVARLLSRRICPKCGRSYNMIFLPPKEDELCDDCGVGLVQRLDDKEETVRHRLKVYREKTQPVIDYYSKKGILLRVDGSQGIDPIVAEVLGILGWSDK

SEQ ID NO: 1923 - DNA, 693 bp, synthetic construct
  misc_feature 1..693: note = variant of adenylate kinase from Thermotoga neapolitana
  source 1..693: mol_type = other DNA
atgcaccatcatcaccatcacgggggctccggcatgggggcatatctggtgttcttaggtccgccgggcgcgggaaaaggtacccaaggccgtattatttcggcaaagactggcatcccgcatattagcacgggcgatatcctgcgtgacatcgtcgctaagcaaaacgatgaagttgcctcgagcattaaagagatcatgctgaaaggtgaactcgttccagatgaactgggtaatgcggtagtaaaacgccgcctgtcggagaaagactgcgaaaaaggctttattttggatggtttcccgcgtaccgtgcgccaagcggaatatctggatagttttcttgaaagccagaatcgccagttgacagccgccgtgctgattgaggtccccgaagatgaagttgttgcacgtctgctgtctcgccgtatctgtccgaaatgcgggcgtagtgccaacatgatttttctgccaccaaaagaagacgagctgtgtgacgattgcggtgtcggcttagtacagcgtttagatgataaggaagaaacggtccgtcaccgcctgaaagtctaccgtgagaagacccagccggtcattgactattatagtaagaaaggtattctcgcacgcgtagatgggtcgcaaggaatcgaccctgtggtggcagaagtcctggggattctgggttggagcgataag

SEQ ID NO: 1924 - protein, 231 aa, synthetic construct
  REGION 1..231: note = variant of adenylate kinase from Thermotoga neapolitana
MHHHHHHGGSGMGAYLVFLGPPGAGKGTQGRIISAKTGIPHISTGDILRDIVAKQNDEVASSIKEIMLKGELVPDELGNAVVKRRLSEKDCEKGFILDGFPRTVRQAEYLDSFLESQNRQLTAAVLIEVPEDEVVARLLSRRICPKCGRSANMIFLPPKEDELCDDCGVGLVQRLDDKEETVRHRLKVYREKTQPVIDYYSKKGILARVDGSQGIDPVVAEVLGILGWSDK

SEQ ID NO: 1925 - DNA, 693 bp, synthetic construct
  misc_feature 1..693: note = variant of adenylate kinase from Thermotoga neapolitana
  source 1..693: mol_type = other DNA
atgcaccatcatcaccatcacgggggctccggcatgggggcatatctggtgttcttaggtccgccgggcgcgggaaaaggtacccaaggccgtattatttcggcaaagactggcatcccgcatattagcacgggcgatatcctgcgtgacatcgtcgctaagcaaaacgatgaagttgcctcgagcattaaagagatcatggagaaaggtgaactcgttccagatgaactgggtaatgcggtagtaaaacgccgcctgtcggagaaagactgcgaaaaaggctttattttggatggtttcccgcgtaccgtgcgccaagcggaatatctggatagttttcttgaaagccagaatcgccagttgacagccgccgtgctgattgaggtccccgaagatgaagttgttgcacgtctgctgtctcgcctgatctgtccgaaatgcgggcgtagtgccaacatgatttttctgccaccaaaagaagacgagctgtgtgacgattgcggtgtcggcttagtacagcgtttagatgataaggaagaaacggtccgtcaccgcctgaaagtctaccgtgagaagacccagccggtcattgactattatagtaagaaaggtattctcgcacgcgtagatgggtcgcaaggaatcgaccctgtcgtggcagaagtcctggggattctgggttggagcgataag

SEQ ID NO: 1926 - protein, 231 aa, synthetic construct
  REGION 1..231: note = variant of adenylate kinase from Thermotoga neapolitana
MHHHHHHGGSGMGAYLVFLGPPGAGKGTQGRIISAKTGIPHISTGDILRDIVAKQNDEVASSIKEIMEKGELVPDELGNAVVKRRLSEKDCEKGFILDGFPRTVRQAEYLDSFLESQNRQLTAAVLIEVPEDEVVARLLSRLICPKCGRSANMIFLPPKEDELCDDCGVGLVQRLDDKEETVRHRLKVYREKTQPVIDYYSKKGILARVDGSQGIDPVVAEVLGILGWSDK

SEQ ID NO: 1927 - DNA, 693 bp, synthetic construct
  misc_feature 1..693: note = variant of adenylate kinase from Thermotoga neapolitana
  source 1..693: mol_type = other DNA
atgcaccatcatcaccatcacgggggctccggcatgggggcatatctggtgttcttaggtccgccgggcgcgggaaaaggtacccaaggccgtattatttcggcaaagactggcatcccgcatattagcacgggcgatatcctgcgtgacatcgtcgctaagcaaaacgatgaagttgcctcgagcattaaagagatcatgctgaaaggtgaactcgttccagatgaactgggtaatgcggtagtaaaacgccgcctgtcggagaaagactgcgaaaaaggctttattttggatggtttcccgcgtaccgtgcgccaagcggaatatctggatagttttcttgaaagccagaatcgccagttgacagccgccgtgctgattgaggtccccgaagatgaagttgttgcacgtctgctgtctcgccgtatctgtccgaaatgcgggcgtagtgccaacatgatttttctgccaccaaaagaagacgagctgtgtgacgattgcggtgtcggcttagtacagcgtttagatgataaggaagaaacggtccgtcaccgcctgaaagtctaccgtgagaagacccagccggtcattgactattatagtaagaaaggtattctcaaacgcgtagatgggtcgcaaggaatcgaccctgtggtggcagaagtcctggggattctgggttggagcgataag

SEQ ID NO: 1928 - protein, 231 aa, synthetic construct
  REGION 1..231: note = variant of adenylate kinase from Thermotoga neapolitana
MHHHHHHGGSGMGAYLVFLGPPGAGKGTQGRIISAKTGIPHISTGDILRDIVAKQNDEVASSIKEIMLKGELVPDELGNAVVKRRLSEKDCEKGFILDGFPRTVRQAEYLDSFLESQNRQLTAAVLIEVPEDEVVARLLSRRICPKCGRSANMIFLPPKEDELCDDCGVGLVQRLDDKEETVRHRLKVYREKTQPVIDYYSKKGILKRVDGSQGIDPVVAEVLGILGWSDK

SEQ ID NO: 1929 - DNA, 693 bp, synthetic construct
  misc_feature 1..693: note = variant of adenylate kinase from Thermotoga neapolitana
  source 1..693: mol_type = other DNA
atgcaccatcatcaccatcacgggggctccggcatgggggcatatctggtgttcttaggtccgccgggcgcgggaaaaggtacccaaggccgtattatttcggcaaagactggcatcccgcatattagcacgggcgatatcctgcgtgacatcgtcgctaagcaaaacgatgaagttgcctcgagcattaaagagatcatggaaaaaggtgaactcgttccagatgaactgggtaatgcggtagtaaaacgccgcctgtcggagaaagactgcgaaaaaggctttattttggatggtttcccgcgtaccgtgcgccaagcggaatatctggatagttttcttgaaagccagaatcgccagttgacagccgccgtgctgattgaggtccccgaagatgaagttgttgcacgtctgctgtctcgcctgatctgtccgaaatgcgggcgtagtgccaacatgatttttctgccaccaaaagaagacgagctgtgtgacgattgcggtgtcggcttagtacagcgtttagatgataaggaagaaacggtccgtcaccgcctgaaagtctaccgtgagaagacccagccggtcattgactattatagtaagaaaggtattctcctgcgcgtagatgggtcgcaaggaatcgaccctatcgtggcagaagtcctggggattctgggttggagcgataag

SEQ ID NO: 1930 - protein, 231 aa, synthetic construct
  REGION 1..231: note = variant of adenylate kinase from Thermotoga neapolitana
MHHHHHHGGSGMGAYLVFLGPPGAGKGTQGRIISAKTGIPHISTGDILRDIVAKQNDEVASSIKEIMEKGELVPDELGNAVVKRRLSEKDCEKGFILDGFPRTVRQAEYLDSFLESQNRQLTAAVLIEVPEDEVVARLLSRLICPKCGRSANMIFLPPKEDELCDDCGVGLVQRLDDKEETVRHRLKVYREKTQPVIDYYSKKGILLRVDGSQGIDPIVAEVLGILGWSDK

SEQ ID NO: 1931 - DNA, 693 bp, synthetic construct
  misc_feature 1..693: note = variant of adenylate kinase from Thermotoga neapolitana
  source 1..693: mol_type = other DNA
atgcaccatcatcaccatcacgggggctccggcatgggggcatatctggtgttcttaggtccgccgggcgcgggaaaaggtacccaaggccgtattatttcggcaaagactggcatcccgcatattagcacgggcgatatcctgcgtgacatcgtcgctaagcaaaacgatgaagttgcctcgagcattaaagagatcatggagaaaggtgaactcgttccagatgaactgggtaatgcggtagtaaaacgccgcctgtcggagaaagactgcgaaaaaggctttattttggatggtttcccgcgtaccgtgcgccaagcggaatatctggatagttttcttgaaagccagaatcgccagttgacagccgccgtgctgattgaggtccccgaagatgaagttgttgcacgtctgctgtctcgcctgatctgtccgaaatgcgggcgtagttacaacatgatttttctgccaccaaaagaagacgagctgtgtgacgattgcggtgtcggcttagtacagcgtttagatgataaggaagaaacggtccgtcaccgcctgaaagtctaccgtgagaagacccagccggtcattgactattatagtaagaaaggtattctcaaacgcgtagatgggtcgcaaggaatcgaccctgtggtggcagaagtcctggggattctgggtcgtagcgataag

SEQ ID NO: 1932 - protein, 231 aa, synthetic construct
  REGION 1..231: note = variant of adenylate kinase from Thermotoga neapolitana
MHHHHHHGGSGMGAYLVFLGPPGAGKGTQGRIISAKTGIPHISTGDILRDIVAKQNDEVASSIKEIMEKGELVPDELGNAVVKRRLSEKDCEKGFILDGFPRTVRQAEYLDSFLESQNRQLTAAVLIEVPEDEVVARLLSRLICPKCGRSYNMIFLPPKEDELCDDCGVGLVQRLDDKEETVRHRLKVYREKTQPVIDYYSKKGILKRVDGSQGIDPVVAEVLGILGRSDK

SEQ ID NO: 1933 - DNA, 693 bp, synthetic construct
  misc_feature 1..693: note = variant of adenylate kinase from Thermotoga neapolitana
  source 1..693: mol_type = other DNA
atgcaccatcatcaccatcacgggggctccggcatgggggcatatctggtgttcttaggtccgccgggcgcgggaaaaggtacccaaggccgtattatttcggcaaagactggcatcccgcatattagcacgggcgatatcctgcgtgacatcgtcgctaagcaaaacgatgaagttgcctcgagcattaaagagatcatggagaaaggtgaactcgttccagatgaactgggtaatgcggtagtaaaacgccgcctgtcggagaaagactgcgaaaaaggctttattttggatggtttcccgcgtaccgtgcgccaagcggaatatctggatagttttcttgaaagccagaatcgccagttgacagccgccgtgctgattgaggtccccgaagatgaagttgttgcacgtctgctgtctcgcctgatctgtccgaaatgcgggcgtagttacaacatgattgcactgccaccaaaagaagacgagctgtgtgacgattgcggtgtcggcttagtacagcgtttagatgataaggaagaaacggtccgtcaccgcctgaaagtctaccgtgagaagacccagccggtcattgactattatagtaagaaaggtattctcaaacgcgtagatgggagcctgggaatcgaccctgtggtggcagaagtcctggggattctgggttggagcgataag

SEQ ID NO: 1934 - protein, 231 aa, synthetic construct
  REGION 1..231: note = variant of adenylate kinase from Thermotoga neapolitana
MHHHHHHGGSGMGAYLVFLGPPGAGKGTQGRIISAKTGIPHISTGDILRDIVAKQNDEVASSIKEIMEKGELVPDELGNAVVKRRLSEKDCEKGFILDGFPRTVRQAEYLDSFLESQNRQLTAAVLIEVPEDEVVARLLSRLICPKCGRSYNMIALPPKEDELCDDCGVGLVQRLDDKEETVRHRLKVYREKTQPVIDYYSKKGILKRVDGSLGIDPVVAEVLGILGWSDK

SEQ ID NO: 1935 - DNA, 693 bp, synthetic construct
  misc_feature 1..693: note = variant of adenylate kinase from Thermotoga neapolitana
  source 1..693: mol_type = other DNA
atgcaccatcatcaccatcacgggggctccggcatgggggcatatctggtgttcttaggtccgccgggcgcgggaaaaggtacccaaggccgtattatttcggcaaagactggcatcccgcatattagcacgggcgatatcctgcgtgacatcgtcgctaagcaaaacgatgaagttgcctcgagcattaaagagatcatggaaaaaggtgaactcgttccagatgaactgggtaatgcggtagtaaaacgccgcctgtcggagaaagactgcgaaaaaggctttattttggatggtttcccgcgtaccgtgcgccaagcggaatatctggatagttttcttgaaagccagaatcgccagttgacagccgccgtgctgcctgaggtccccgaagatgaagttgttgcacgtctgctgtctcgccgtatctgtccgaaatgcgggcgtagtgccaacatgatttttctgccaccaaaagaagacgagctgtgtgacgattgcggtgtcggcttagtacagcgtttagatgataaggaagaaacggtccgtcaccgcctgaaagtctaccgtgagaagacccagccggtcattgactattatagtaagaaaggtattctcaaacgcgtagatgggtcgcaaggaatcgaccctatcgtggcagaagtcctggggattctgggttggagcgataag

SEQ ID NO: 1936 - protein, 231 aa, synthetic construct
  REGION 1..231: note = variant of adenylate kinase from Thermotoga neapolitana
MHHHHHHGGSGMGAYLVFLGPPGAGKGTQGRIISAKTGIPHISTGDILRDIVAKQNDEVASSIKEIMEKGELVPDELGNAVVKRRLSEKDCEKGFILDGFPRTVRQAEYLDSFLESQNRQLTAAVLPEVPEDEVVARLLSRRICPKCGRSANMIFLPPKEDELCDDCGVGLVQRLDDKEETVRHRLKVYREKTQPVIDYYSKKGILKRVDGSQGIDPIVAEVLGILGWSDK

SEQ ID NO: 1937 - DNA, 693 bp, synthetic construct
  misc_feature 1..693: note = variant of adenylate kinase from Thermotoga neapolitana
  source 1..693: mol_type = other DNA
atgcaccatcatcaccatcacgggggctccggcatgggggcatatctggtgttcttaggtccgccgggcgcgggaaaaggtacccaaggccgtattatttcggcaaagactggcatcccgcatattagcacgggcgatatcctgcgtgacatcgtcgctaagcaaaacgatgaagttgcctcgagcattaaagagatcatggagaaaggtgaactcgttccagatgaactgggtaatgcggtagtaaaacgccgcctgtcggagaaagactgcgaaaaaggctttattttggatggtttcccgcgtaccgtgcgccaagcggaatatctggatagttttcttgaaagccagaatcgccagttgacagccgccgtgctgcctgaggtccccgaagatgaagttgttgcacgtctgctgtctcgcctgatctgtccgaaatgcgggcgtagtgccaacatgatttttctgccaccaaaagaagacgagctgtgtgacgattgcggtgtcggcttagtacagcgtttagatgataaggaagaaacggtccgtcaccgcctgaaagtctaccgtgagaagacccagccggtcattgactattatagtaagaaaggtattctcaaacgcgtagatgggtcgcaaggaatcgaccctgtggtggcagaagtcctggggattctgggttggagcgataag

SEQ ID NO: 1938 - protein, 231 aa, synthetic construct
  REGION 1..231: note = variant of adenylate kinase from Thermotoga neapolitana
MHHHHHHGGSGMGAYLVFLGPPGAGKGTQGRIISAKTGIPHISTGDILRDIVAKQNDEVASSIKEIMEKGELVPDELGNAVVKRRLSEKDCEKGFILDGFPRTVRQAEYLDSFLESQNRQLTAAVLPEVPEDEVVARLLSRLICPKCGRSANMIFLPPKEDELCDDCGVGLVQRLDDKEETVRHRLKVYREKTQPVIDYYSKKGILKRVDGSQGIDPVVAEVLGILGWSDK

SEQ ID NO: 1939 - DNA, 693 bp, synthetic construct
  misc_feature 1..693: note = variant of adenylate kinase from Thermotoga neapolitana
  source 1..693: mol_type = other DNA
atgcaccatcatcaccatcacgggggctccggcatgggggcatatctggtgttcttaggtccgccgggcgcgggaaaaggtacccaaggccgtattatttcggcaaagactggcatcccgcatattagcacgggcgatatcctgcgtgacatcgtcgctaagcaaaacgatgaagttgcctcgagcattaaagagatcatggagaaaggtgaactcgttccagatgaactgggtaatgcggtagtaaaacgccgcctgtcggagaaagactgcgaaaaaggctttattttggatggtttcccgcgtaccgtgcgccaagcggaatatctggatagttttcttgaaagccagaatcgccagttgacagccgccgtgctgattgaggtccccgaagatgaagttgttgcacgtctgctgtctcgcctgatctgtccgaaatgcgggcgtagttacaacatgattgcactgccaccaaaagaagacgagctgtgtgacgattgcggtgtcggcttagtacagcgtttagatgataaggaagaaacggtccgtcaccgcctgaaagtctaccgtgagaagacccagccggtcattgactattatagtaagaaaggtattctcaaacgcgtagatgggtcgcaaggaatcgaccctgtggttgcagaagtcctggggattctgggtcgtagcgataag

SEQ ID NO: 1940 - protein, 231 aa, synthetic construct
  REGION 1..231: note = variant of adenylate kinase from Thermotoga neapolitana
MHHHHHHGGSGMGAYLVFLGPPGAGKGTQGRIISAKTGIPHISTGDILRDIVAKQNDEVASSIKEIMEKGELVPDELGNAVVKRRLSEKDCEKGFILDGFPRTVRQAEYLDSFLESQNRQLTAAVLIEVPEDEVVARLLSRLICPKCGRSYNMIALPPKEDELCDDCGVGLVQRLDDKEETVRHRLKVYREKTQPVIDYYSKKGILKRVDGSQGIDPVVAEVLGILGRSDK

SEQ ID NO: 1941 - DNA, 693 bp, synthetic construct
  misc_feature 1..693: note = variant of adenylate kinase from Thermotoga neapolitana
  source 1..693: mol_type = other DNA
atgcaccatcatcaccatcacgggggctccggcatgggggcatatctggtgttcttaggtccgccgggcgcgggaaaaggtacccaaggccgtattatttcggcaaagactggcatcccgcatattagcacgggcgatatcctgcgtgacatcgtcgctaagcaaaacgatgaagttgcctcgagcattaaagagatcatggagaaaggtgaactcgttccagatgaactgggtaatgcggtagtaaaacgccgcctgtcggagaaagactgcgaaaaaggctttattttggatggtttcccgcgtaccgtgcgccaagcggaatatctggatagttttcttgaaagccagaatcgccagttgacagccgccgtgctgattgaggtccccgaagatgaagttgttgcacgtctgctgtctcgcctgagttgtccgaaatgcgggcgtagttacaacatgattgcactgccaccaaaagaagacgagctgtgtgacgattgcggtgtcggcttagtacagcgtttagatgataaggaagaaacggtccgtcaccgcctgaaagtctaccgtgagaagacccagccggtcattgactattatagtaagaaaggtctgctcaaacgcgtagatgggagccagggaatcgaccctgtggttgcagaagtcctggggattctgggttggagcgataag

SEQ ID NO: 1942 - protein, 231 aa, synthetic construct
  REGION 1..231: note = variant of adenylate kinase from Thermotoga neapolitana
MHHHHHHGGSGMGAYLVFLGPPGAGKGTQGRIISAKTGIPHISTGDILRDIVAKQNDEVASSIKEIMEKGELVPDELGNAVVKRRLSEKDCEKGFILDGFPRTVRQAEYLDSFLESQNRQLTAAVLIEVPEDEVVARLLSRLSCPKCGRSYNMIALPPKEDELCDDCGVGLVQRLDDKEETVRHRLKVYREKTQPVIDYYSKKGLLKRVDGSQGIDPVVAEVLGILGWSDK

SEQ ID NO: 1943 - DNA, 693 bp, synthetic construct
  misc_feature 1..693: note = variant of adenylate kinase from Thermotoga neapolitana
  source 1..693: mol_type = other DNA
atgcaccatcatcaccatcacgggggctccggcatgggggcatatctggtgttcttaggtccgccgggcgcgggaaaaggtacccaaggccgtattatttcggcaaagactggcatcccgcatattagcacgggcgatatcctgcgtgacatcgtcgctaagcaaaacgatgaagttgcctcgagcattaaagagatcatggagaaaggtgaactcgttccagatgaactgggtaatgcggtagtaaaacgccgcctgtcggagaaagactgcgaaaaaggctttattttggatggtttcccgcgtaccgtgcgccaagcggaatatctggatagttttcttgaaagccagaatcgccagttgacagccgccgtgctgattgaggtccccgaagatgaagttgttgcacgtctgctgtctcgcctgatctgtccgaaatgcgggcgtagtgccaacatgatttttctgccaccaaaagaagacgagctgtgtgacgattgcggtgtcggcttagtacagcgtttagatgataaggaagaaacggtccgtcaccgcctgaaagtctaccgtgagaagacccagccggtcattgactattatagtaagaaaggtattctcaaacgcgtagatgggtcgcaaggaatcccacctgccgtggcagaagtcctggggattctgggttggagcgataag

SEQ ID NO: 1944 - protein, 231 aa, synthetic construct
  REGION 1..231: note = variant of adenylate kinase from Thermotoga neapolitana
MHHHHHHGGSGMGAYLVFLGPPGAGKGTQGRIISAKTGIPHISTGDILRDIVAKQNDEVASSIKEIMEKGELVPDELGNAVVKRRLSEKDCEKGFILDGFPRTVRQAEYLDSFLESQNRQLTAAVLIEVPEDEVVARLLSRLICPKCGRSANMIFLPPKEDELCDDCGVGLVQRLDDKEETVRHRLKVYREKTQPVIDYYSKKGILKRVDGSQGIPPAVAEVLGILGWSDK

SEQ ID NO: 1945 - DNA, 693 bp, synthetic construct
  misc_feature 1..693: note = variant of adenylate kinase from Thermotoga neapolitana
  source 1..693: mol_type = other DNA
atgcaccatcatcaccatcacgggggctccggcatgggggcatatctggtgttcttaggtccgccgggcgcgggaaaaggtacccaaggccgtattatttcggcaaagactggcatcccgcatattagcacgggcgatatcctgcgtgacatcgtcgctaagcaaaacgatgaagttgcctcgagcattaaagagatcatgctgaaaggtgaactcgttccagatgaactgggtaatgcggtagtaaaacgccgcctgtcggagaaagactgcgaaaaaggctttattttggatggtttcccgcgtaccgtgcgccaagcggaatatctggatagttttcttgaaagccagaatcgccagttgacagccgccgtgctgattgaggtccccgaagatgaagttgttgcacgtctgctgtctcgccgtatctgtccgaaatgcgggcgtagttacaacatgatttttctgccaccaaaagaagacgagctgtgtgacgattgcggtgtcggcttagtacagcgtttagatgataaggaagaaacggtccgtcaccgcctgaaagtctaccgtgagaagacccagccggtcattgactattatagtaagaaaggtattctcctgcgcgtagatgggtcgcaaggaatcgaccctgtggtggcagaagtcctggggattctgggttggagcgataag

SEQ ID NO: 1946 - protein, 231 aa, synthetic construct
  REGION 1..231: note = variant of adenylate kinase from Thermotoga neapolitana
MHHHHHHGGSGMGAYLVFLGPPGAGKGTQGRIISAKTGIPHISTGDILRDIVAKQNDEVASSIKEIMLKGELVPDELGNAVVKRRLSEKDCEKGFILDGFPRTVRQAEYLDSFLESQNRQLTAAVLIEVPEDEVVARLLSRRICPKCGRSYNMIFLPPKEDELCDDCGVGLVQRLDDKEETVRHRLKVYREKTQPVIDYYSKKGILLRVDGSQGIDPVVAEVLGILGWSDK

SEQ ID NO: 1947 - DNA, 693 bp, synthetic construct
  misc_feature 1..693: note = variant of adenylate kinase from Thermotoga neapolitana
  source 1..693: mol_type = other DNA
atgcaccatcatcaccatcacgggggctccggcatgggggcatatctggtgttcttaggtccgccgggcgcgggaaaaggtacccaaggccgtattatttcggcaaagactggcatcccgcatattagcacgggcgatatcctgcgtgacatcgtcgctaagcaaaacgatgaagttgcctcgagcattaaagagatcatggagaaaggtgaactcgttccagatgaactgggtaatgtggtagtaaaacgccgcctgtcggagaaagactgcgaaaaaggctttattttggatggtttcccgcgtaccgtgcgccaagcggaatatctggatagttttcttgaaagccagaatcgccagttgacagccgccgtgctgattgaggtccccgaagatgaagttgttgcacgtctgctgtctcgcctgatctgtccgaaatgcgggcgtagtgccaacatgatttttctgccaccaaaagaagacgagctgtgtgacgattgcggtgtcggcttagtacagcgtttagatgataaggaagaaacggtccgtcaccgcctgaaagtctaccgtgagaagacccagccggtcattgactattatagtaagaaaggtattctcctgcgcgtagatgggtcgcaaggaatcgaccctgtggtggcagaagtcctggggattctgggttggagcgataag

SEQ ID NO: 1948 - protein, 231 aa, synthetic construct
  REGION 1..231: note = variant of adenylate kinase from Thermotoga neapolitana
MHHHHHHGGSGMGAYLVFLGPPGAGKGTQGRIISAKTGIPHISTGDILRDIVAKQNDEVASSIKEIMEKGELVPDELGNVVVKRRLSEKDCEKGFILDGFPRTVRQAEYLDSFLESQNRQLTAAVLIEVPEDEVVARLLSRLICPKCGRSANMIFLPPKEDELCDDCGVGLVQRLDDKEETVRHRLKVYREKTQPVIDYYSKKGILLRVDGSQGIDPVVAEVLGILGWSDK

SEQ ID NO: 1949 - DNA, 693 bp, synthetic construct
  misc_feature 1..693: note = variant of adenylate kinase from Thermotoga neapolitana
  source 1..693: mol_type = other DNA
atgcaccatcatcaccatcacgggggctccggcatgggggcatatctggtgttcttaggtccgccgggcgcgggaaaaggtacccaaggccgtattatttcggcaaagactggcatcccgcatattagcacgggcgatatcctgcgtgacatcgtcgctaagcaaaacgatgaagttgcctcgagcattaaagagatcatggagaaaggtgaactcgttccagatgaactgggtaatgcggtagtaaaacgccgcctgtcggagaaagactgcgaaaaaggctttattttggatggtttcccgcgtaccgtgcgccaagcggaatatctggatagttttcttgaaagccagaatcgccagttgacagccgccgtgctgattgaggtccccgaagatgaagttgttgcacgtctgctgtctcgcctgatctgtccgaaatgcgggcgtagttacaacatgatttttctgccaccaaaagaagacgagctgtgtgacgattgcggtgtcggcttagtacagcgtttagatgataaggaagaaacggtccgtcaccgcctgaaagtctaccgtgagaagacccagccggtcattgactattatagtaagaaaggtctgctcaaacgcgtagatgggtcgcaaggaatcgaccctgtggtggcagaagtcctggggattctgggtcgtagcgataag

SEQ ID NO: 1950 - protein, 231 aa, synthetic construct
  REGION 1..231: note = variant of adenylate kinase from Thermotoga neapolitana
MHHHHHHGGSGMGAYLVFLGPPGAGKGTQGRIISAKTGIPHISTGDILRDIVAKQNDEVASSIKEIMEKGELVPDELGNAVVKRRLSEKDCEKGFILDGFPRTVRQAEYLDSFLESQNRQLTAAVLIEVPEDEVVARLLSRLICPKCGRSYNMIFLPPKEDELCDDCGVGLVQRLDDKEETVRHRLKVYREKTQPVIDYYSKKGLLKRVDGSQGIDPVVAEVLGILGRSDK

SEQ ID NO: 1951 - DNA, 693 bp, synthetic construct
  misc_feature 1..693: note = variant of adenylate kinase from Thermotoga neapolitana
  source 1..693: mol_type = other DNA
atgcaccatcatcaccatcacgggggctccggcatgggggcatatctggtgttcttaggtccgccgggcgcgggaaaaggtacccaaggccgtattatttcggcaaagactggcatcccgcatattagcacgggcgatatcctgcgtgacatcgtcgctaagcaaaacgatgaagttgcctcgagcattaaagagatcatgctgaaaggtgaactcgttccagatgaactgggtaatgcggtagtaaaacgccgcctgtcggagaaagactgcgaaaaaggctttattttggatggtttcccgcgtaccgtgcgccaagcggaatatctggatagttttcttgaaagccagaatcgccagttgacagccgccgtgctgattgaggtccccgaagatgaagttgttgcacgtctgctgtctcgccgtatctgtccgaaatgcgggcgtagttacaacatgatttttctgccaccaaaagaagacgagctgtgtgacgattgcggtgtcggcttagtacagcgtttagatgataaggaagaaacggtccgtcaccgcctgaaagtctaccgtgagaagacccagccggtcattgactattatagtaagaaaggtattctcgcacgcgtagatgggtcgcaaggaatcccacctatcgtggcagaagtcctggggattctgggttggagcgataag

SEQ ID NO: 1952 - protein, 231 aa, synthetic construct
  REGION 1..231: note = variant of adenylate kinase from Thermotoga neapolitana
MHHHHHHGGSGMGAYLVFLGPPGAGKGTQGRIISAKTGIPHISTGDILRDIVAKQNDEVASSIKEIMLKGELVPDELGNAVVKRRLSEKDCEKGFILDGFPRTVRQAEYLDSFLESQNRQLTAAVLIEVPEDEVVARLLSRRICPKCGRSYNMIFLPPKEDELCDDCGVGLVQRLDDKEETVRHRLKVYREKTQPVIDYYSKKGILARVDGSQGIPPIVAEVLGILGWSDK

SEQ ID NO: 1953 - DNA, 693 bp, synthetic construct
  misc_feature 1..693: note = variant of adenylate kinase from Thermotoga neapolitana
  source 1..693: mol_type = other DNA
atgcaccatcatcaccatcacgggggctccggcatgggggcatatctggtgttcttaggtccgccgggcgcgggaaaaggtacccaaggccgtattatttcggcaaagactggcatcccgcatattagcacgggcgatatcctgcgtgacatcgtcgctaagcaaaacgatgaagttgcctcgagcattaaagagatcatgctgaaaggtgaactcgttccagatgaactgggtaatgcggtagtaaaacgccgcctgtcggagaaagactgcgaaaaaggctttattttggatggtttcccgcgtaccgtgcgccaagcggaatatctggatagttttcttgaaagccagaatcgccagttgacagccgccgtgctgattgaggtccccgaagatgaagttgttgcacgtctgctgtctcgcctgatctgtccgaaatgcgggcgtagttacaacatgatttttctgccaccaaaagaagacgagctgtgtgacgattgcggtgtcggcttagtacagcgtttagatgataaggaagaaacggtccgtcaccgcctgaaagtctaccgtgagaagacccagccggtcattgactattatagtaagaaaggtattctcaaacgcgtagatgggtcgcaaggaatcgaccctatcgtggcagaagtcctggggattctgggttggagcgataag

SEQ ID NO: 1954 - protein, 231 aa, synthetic construct
  REGION 1..231: note = variant of adenylate kinase from Thermotoga neapolitana
MHHHHHHGGSGMGAYLVFLGPPGAGKGTQGRIISAKTGIPHISTGDILRDIVAKQNDEVASSIKEIMLKGELVPDELGNAVVKRRLSEKDCEKGFILDGFPRTVRQAEYLDSFLESQNRQLTAAVLIEVPEDEVVARLLSRLICPKCGRSYNMIFLPPKEDELCDDCGVGLVQRLDDKEETVRHRLKVYREKTQPVIDYYSKKGILKRVDGSQGIDPIVAEVLGILGWSDK

SEQ ID NO: 1955 - DNA, 693 bp, synthetic construct
  misc_feature 1..693: note = variant of adenylate kinase from Thermotoga neapolitana
  source 1..693: mol_type = other DNA
atgcaccatcatcaccatcacgggggctccggcatgggggcatatctggtgttcttaggtccgccgggcgcgggaaaaggtacccaaggccgtattatttcggcaaagactggcatcccgcatattagcacgggcgatatcctgcgtgacatcgtcgctaagcaaaacgatgaagttgcctcgagcattaaagagatcatgctgaaaggtgaactcgttccagatgaactgggtaatgcggtagtaaaacgccgcctgtcggagaaagactgcgaaaaaggctttattttggatggtttcccgcgtaccgtgcgccaagcggaatatctggatagttttcttgaaagccagaatcgccagttgacagccgccgtgctgattgaggtccccgaagatgaagttgttgcacgtctgctgtctcgcctgatctgtccgaaatgcgggcgtagttacaacatgatttttctgccaccaaaagaagacgagctgtgtgacgattgcggtgtcggcttagtacagcgtttagatgataaggaagaaacggtccgtcaccgcctgaaagtctaccgtgagaagacccagccggtcattgactattatagtaagaaaggtattctcgcacgcgtagatgggtcgcaaggaatcgaccctgtcgtggcagaagtcctggggattctgggttggagcgataag

SEQ ID NO: 1956 - protein, 231 aa, synthetic construct
  REGION 1..231: note = variant of adenylate kinase from Thermotoga neapolitana
MHHHHHHGGSGMGAYLVFLGPPGAGKGTQGRIISAKTGIPHISTGDILRDIVAKQNDEVASSIKEIMLKGELVPDELGNAVVKRRLSEKDCEKGFILDGFPRTVRQAEYLDSFLESQNRQLTAAVLIEVPEDEVVARLLSRLICPKCGRSYNMIFLPPKEDELCDDCGVGLVQRLDDKEETVRHRLKVYREKTQPVIDYYSKKGILARVDGSQGIDPVVAEVLGILGWSDK

SEQ ID NO: 1957 - DNA, 693 bp, synthetic construct
  misc_feature 1..693: note = variant of adenylate kinase from Thermotoga neapolitana
  source 1..693: mol_type = other DNA
atgcaccatcatcaccatcacgggggctccggcatgggggcatatctggtgttcttaggtccgccgggcgcgggaaaaggtacccaaggccgtattatttcggcaaagactggcatcccgcatattagcacgggcgatatcctgcgtgacatcgtcgctaagcaaaacgatgaagttgcctcgagcattaaagagatcatggaaaaaggtgaactcgttccagatgaactgggtaatgcggtagtaaaacgccgcctgtcggagaaagactgcgaaaaaggctttattttggatggtttcccgcgtaccgtgcgccaagcggaatatctggatagttttcttgaaagccagaatcgccagttgacagccgccgtgctgattgaggtccccgaagatgaagttgttgcacgtctgctgtctcgcctgatctgtccgaaatgcgggcgtagttacaacatgatttttctgccaccaaaagaagacgagctgtgtgacgattgcggtgtcggcttagtacagcgtttagatgataaggaagaaacggtccgtcaccgcctgaaagtctaccgtgagaagacccagccggtcattgactattatagtaagaaaggtattctcaaacgcgtagatgggtcgcaaggaatcccacctatcgtggcagaagtcctggggattctgggttggagcgataag

SEQ ID NO: 1958 - protein, 231 aa, synthetic construct
  REGION 1..231: note = variant of adenylate kinase from Thermotoga neapolitana
MHHHHHHGGSGMGAYLVFLGPPGAGKGTQGRIISAKTGIPHISTGDILRDIVAKQNDEVASSIKEIMEKGELVPDELGNAVVKRRLSEKDCEKGFILDGFPRTVRQAEYLDSFLESQNRQLTAAVLIEVPEDEVVARLLSRLICPKCGRSYNMIFLPPKEDELCDDCGVGLVQRLDDKEETVRHRLKVYREKTQPVIDYYSKKGILKRVDGSQGIPPIVAEVLGILGWSDK

SEQ ID NO: 1959 - DNA, 693 bp, synthetic construct
  misc_feature 1..693: note = variant of adenylate kinase from Thermotoga neapolitana
  source 1..693: mol_type = other DNA
atgcaccatcatcaccatcacgggggctccggcatgggggcatatctggtgttcttaggtccgccgggcgcgggaaaaggtacccaaggccgtattatttcggcaaagactggcatcccgcatattagcacgggcgatatcctgcgtgacatcgtcgctaagcaaaacgatgaagttgcctcgagcattaaagagatcatgctgaaaggtgaactcgttccagatgaactgggtaatgcggtagtaaaacgccgcctgtcggagaaagactgcgaaaaaggctttattttggatggtttcccgcgtaccgtgcgccaagcggaatatctggatagttttcttgaaagccagaatcgccagttgacagccgccgtgctgattgaggtccccgaagatgaagttgttgcacgtctgctgtctcgccgtatctgtccgaaatgcgggcgtagttacaacatgatttttctgccaccaaaagaagacgagctgtgtgacgattgcggtgtcggcttagtacagcgtttagatgataaggaagaaacggtccgtcaccgcctgaaagtctaccgtgagaagacccagccggtcattgactattatagtaagaaaggtattctcaaacgcgtagatgggtcgcaaggaatcgaccctgtcgtggcagaagtcctggggattctgggttggagcgataag

SEQ ID NO: 1960 - protein, 231 aa, synthetic construct
  REGION 1..231: note = variant of adenylate kinase from Thermotoga neapolitana
MHHHHHHGGSGMGAYLVFLGPPGAGKGTQGRIISAKTGIPHISTGDILRDIVAKQNDEVASSIKEIMLKGELVPDELGNAVVKRRLSEKDCEKGFILDGFPRTVRQAEYLDSFLESQNRQLTAAVLIEVPEDEVVARLLSRRICPKCGRSYNMIFLPPKEDELCDDCGVGLVQRLDDKEETVRHRLKVYREKTQPVIDYYSKKGILKRVDGSQGIDPVVAEVLGILGWSDK

SEQ ID NO: 1961 - DNA, 693 bp, synthetic construct
  misc_feature 1..693: note = variant of adenylate kinase from Thermotoga neapolitana
  source 1..693: mol_type = other DNA
atgcaccatcatcaccatcacgggggctccggcatgggggcatatctggtgttcttaggtccgccgggcgcgggaaaaggtacccaaggccgtattatttcggcaaagactggcatcccgcatattagcacgggcgatatcctgcgtgacatcgtcgctaagcaaaacgatgaagttgcctcgagcattaaagagatcatggagaaaggtgaactcgttccagatgaactgggtaatgcggtagtaaaacgccgcctgtcggagaaagactgcgaaaaaggctttattttggatggtttcccgcgtaccgtgcgccaagcggaatatctggatagttttcttgaaagccagaatcgccagttgacagccgccgtgctgattgaggtccccgaagatgaagttgttgcacgtctgctgtctcgcctgatctgtccgaaatgcgggcgtagttacaacatgattttcctgccaccaaaagaagacgagctgtgtgacgattgcggtgtcggcttagtacagcgtttagatgataaggaagaaacggtccgtcaccgcctgaaagtctaccgtgagaagacccagccggtcattgactattatagtaagaaaggtattctcaaacgcgtagatgggcgccagggaatcgaccctgtggtggcagaagtcctggggattctgggttggagcgataag

SEQ ID NO: 1962 - protein, 231 aa, synthetic construct
  REGION 1..231: note = variant of adenylate kinase from Thermotoga neapolitana
MHHHHHHGGSGMGAYLVFLGPPGAGKGTQGRIISAKTGIPHISTGDILRDIVAKQNDEVASSIKEIMEKGELVPDELGNAVVKRRLSEKDCEKGFILDGFPRTVRQAEYLDSFLESQNRQLTAAVLIEVPEDEVVARLLSRLICPKCGRSYNMIFLPPKEDELCDDCGVGLVQRLDDKEETVRHRLKVYREKTQPVIDYYSKKGILKRVDGRQGIDPVVAEVLGILGWSDK

SEQ ID NO: 1963 - DNA, 693 bp, synthetic construct
  misc_feature 1..693: note = variant of adenylate kinase from Thermotoga neapolitana
  source 1..693: mol_type = other DNA
atgcaccatcatcaccatcacgggggctccggcatgggggcatatctggtgttcttaggtccgccgggcgcgggaaaaggtacccaaggccgtattatttcggcaaagactggcatcccgcatattagcacgggcgatatcctgcgtgacatcgtcgctaagcaaaacgatgaagttgcctcgagcattaaagagatcatgctgaaaggtgaactcgttccagatgaactgggtaatgcggtagtaaaacgccgcctgtcggagaaagactgcgaaaaaggctttattttggatggtttcccgcgtaccgtgcgccaagcggaatatctggatagttttcttgaaagccagaatcgccagttgacagccgccgtgctgattgaggtccccgaagatgaagttgttgcacgtctgctgtctcgcctgatctgtccgaaatgcgggcgtagttacaacatgatttttctgccaccaaaagaagacgagctgtgtgacgattgcggtgtcggcttagtacagcgtttagatgataaggaagaaacggtccgtcaccgcctgaaagtctaccgtgagaagacccagccggtcattgactattatagtaagaaaggtattctcctgcgcgtagatgggtcgcaaggaatcgaccctgtggtggcagaagtcctggggattctgggttggagcgataag

SEQ ID NO: 1964 - protein, 231 aa, synthetic construct
  REGION 1..231: note = variant of adenylate kinase from Thermotoga neapolitana
MHHHHHHGGSGMGAYLVFLGPPGAGKGTQGRIISAKTGIPHISTGDILRDIVAKQNDEVASSIKEIMLKGELVPDELGNAVVKRRLSEKDCEKGFILDGFPRTVRQAEYLDSFLESQNRQLTAAVLIEVPEDEVVARLLSRLICPKCGRSYNMIFLPPKEDELCDDCGVGLVQRLDDKEETVRHRLKVYREKTQPVIDYYSKKGILLRVDGSQGIDPVVAEVLGILGWSDK

SEQ ID NO: 1965 - DNA, 693 bp, synthetic construct
  misc_feature 1..693: note = variant of adenylate kinase from Thermotoga neapolitana
  source 1..693: mol_type = other DNA
atgcaccatcatcaccatcacgggggctccggcatgggggcatatctggtgttcttaggtccgccgggcgcgggaaaaggtacccaaggccgtattatttcggcaaagactggcatcccgcatattagcacgggcgatatcctgcgtgacatcgtcgctaagcaaaacgatgaagttgcctcgagcattaaagagatcatggagaaaggtgaactcgttccagatgaactgggtaatgcggtagtaaaacgccgcctgtcggagaaagactgcgaaaaaggctttattttggatggtttcccgcgtaccgtgcgccaagcggaatatctggatagttttcttgaaagccagaatcgccagttgacagccgccgtgctgattgaggtccccgaagatgaagttgttgcacgtctgctgtctcgcctgatctgtccgaaatgcgggcgtagttacaacatgatttttctgccaccaaaagaagacgagctgtgtgacgattgcggtgtcggcttagtacagcgtttagatgataaggaagaaacggtccgtcaccgcctgaaagtctaccgtgagaagacccagccggtcattgactattatagtaagaaaggtctgctcaaacgcgtagatgggtcgcaaggaatcgaccctgtggttgcagaagtcctggggattctgggttggagcgataag

SEQ ID NO: 1966 - protein, 231 aa, synthetic construct
  REGION 1..231: note = variant of adenylate kinase from Thermotoga neapolitana
MHHHHHHGGSGMGAYLVFLGPPGAGKGTQGRIISAKTGIPHISTGDILRDIVAKQNDEVASSIKEIMEKGELVPDELGNAVVKRRLSEKDCEKGFILDGFPRTVRQAEYLDSFLESQNRQLTAAVLIEVPEDEVVARLLSRLICPKCGRSYNMIFLPPKEDELCDDCGVGLVQRLDDKEETVRHRLKVYREKTQPVIDYYSKKGLLKRVDGSQGIDPVVAEVLGILGWSDK

SEQ ID NO: 1967 - DNA, 693 bp, synthetic construct
  misc_feature 1..693: note = variant of adenylate kinase from Thermotoga neapolitana
  source 1..693: mol_type = other DNA
atgcaccatcatcaccatcacgggggctccggcatgggggcatatctggtgttcttaggtccgccgggcgcgggaaaaggtacccaaggccgtattatttcggcaaagactggcatcccgcatattagcacgggcgatatcctgcgtgacatcgtcgctaagcaaaacgatgaagttgcctcgagcattaaagagatcatggagaaaggtgaactcgttccagatgaactgggtaatgcggtagtaaaacgccgcctgtcggagaaagactgcgaaaaaggctttattttggatggtttcccgcgtaccgtgcgccaagcggaatatctggatagttttcttgaaagccagaatcgccagttgacagccgccgtgctgattgaggtccccgaagatgaagttgttgcacgtctgctgtctcgccgtatctgtccgaaatgcgggcgtagttacaacatgatttttctgccaccaaaagaagacgagctgtgtgacgattgcggtgtcggcttagtacagcgtttagatgataaggaagaaacggtccgtcaccgcctgaaagtctaccgtgagaagacccagccggtcattgactattatagtaagaaaggtattctcgcacgcgtagatgggtcgcaaggaatcccacctatcgtggcagaagtcctggggattctgggttggagcgataag

SEQ ID NO: 1968 - protein, 231 aa, synthetic construct
  REGION 1..231: note = variant of adenylate kinase from Thermotoga neapolitana
MHHHHHHGGSGMGAYLVFLGPPGAGKGTQGRIISAKTGIPHISTGDILRDIVAKQNDEVASSIKEIMEKGELVPDELGNAVVKRRLSEKDCEKGFILDGFPRTVRQAEYLDSFLESQNRQLTAAVLIEVPEDEVVARLLSRRICPKCGRSYNMIFLPPKEDELCDDCGVGLVQRLDDKEETVRHRLKVYREKTQPVIDYYSKKGILARVDGSQGIPPIVAEVLGILGWSDK

SEQ ID NO: 1969 - DNA, 693 bp, synthetic construct
  misc_feature 1..693: note = variant of adenylate kinase from Thermotoga neapolitana
  source 1..693: mol_type = other DNA
atgcaccatcatcaccatcacgggggctccggcatgggggcatatctggtgttattaggtccgccgggcgcgggaaaaggtacccaaggccgtattatttcggcaaagactggcatcccgcatattagcacgggcgatatcctgcgtgacatcgtcgctaagcaaaacgatgaagttgcctcgagcattaaagagatcatgctgaaaggtgaactcgttccagatgaactgggtaatgcggtagtaaaacgccgcctgtcggagaaagactgcgaaaaaggctttattttggatggtttcccgcgtaccgtgcgccaagcggaatatctggatagttttcttgaaagccagggccgccagttgacagccgccgtgctgattgaggtccccgaagatgaagttgttgcacgtctgctgtctcgccgtatctgtccgaaatgcgggcgtagttacaacatgatttttctgccaccaaaagaagacgagctgtgtgacgattgcggtgtcggcttagtacagcgtttagatgataaggaagaaacggtccgtcaccgcctgaaagtctaccgtgagaagacccagccggtcattgactattatagtaagaaaggtattctcgcacgcgtagatgggtcgcaaggaatcccacctatcgtggcagaagtcctggggattctgggttggagcgataag

SEQ ID NO: 1970 - protein, 231 aa, synthetic construct
  REGION 1..231: note = variant of adenylate kinase from Thermotoga neapolitana
MHHHHHHGGSGMGAYLVLLGPPGAGKGTQGRIISAKTGIPHISTGDILRDIVAKQNDEVASSIKEIMLKGELVPDELGNAVVKRRLSEKDCEKGFILDGFPRTVRQAEYLDSFLESQGRQLTAAVLIEVPEDEVVARLLSRRICPKCGRSYNMIFLPPKEDELCDDCGVGLVQRLDDKEETVRHRLKVYREKTQPVIDYYSKKGILARVDGSQGIPPIVAEVLGILGWSDK

SEQ ID NO: 1971 - DNA, 693 bp, synthetic construct
  misc_feature 1..693: note = variant of adenylate kinase from Thermotoga neapolitana
  source 1..693: mol_type = other DNA
atgcaccatcatcaccatcacgggggctccggcatgggggcatatctggtgttcttaggtccgccgggcgcgggaaaaggtacccaaggccgtattatttcggcaaagactggcatcccgcatattagcacgggcgatatcctgcgtgacatcgtcgctaagcaaaacgatgaagttgcctcgagcattaaagagatcatgctgaaaggtgaactcgttccagatgaactgggtaatgcggtagtaaaacgccgcctgatggagaaagactgcgaaaaaggctttattttggatggtttcccgcgtaccgtgcgccaagcggaatatctggatagttttcttgaaagccagaataaacagttgacagccgccgtgctgattgaggtccccgaagatgaagttgttgcacgtctgctgtctcgccgtatctgtccgaaatgcgggcgtagttacaacatgatttttctgccaccaaaagaagacgagctgtgtgacgattgcggtgtcggcttagtacagcgtttagatgataaggaagaaacggtccgtcaccgcctgaaagtctaccgtgaggcgacccagccggtcattgactattatagtaagaaaggtattctcgcacgcgtagatgggtcgcaaggaatcccacctatcgtggcagaagtcctggggattctgggttggagcgataag

SEQ ID NO: 1972 - protein, 231 aa, synthetic construct
  REGION 1..231: note = variant of adenylate kinase from Thermotoga neapolitana
MHHHHHHGGSGMGAYLVFLGPPGAGKGTQGRIISAKTGIPHISTGDILRDIVAKQNDEVASSIKEIMLKGELVPDELGNAVVKRRLMEKDCEKGFILDGFPRTVRQAEYLDSFLESQNKQLTAAVLIEVPEDEVVARLLSRRICPKCGRSYNMIFLPPKEDELCDDCGVGLVQRLDDKEETVRHRLKVYREATQPVIDYYSKKGILARVDGSQGIPPIVAEVLGILGWSDK

SEQ ID NO: 1973 - DNA, 693 bp, synthetic construct
  misc_feature 1..693: note = variant of adenylate kinase from Thermotoga neapolitana
  source 1..693: mol_type = other DNA
atgcaccatcatcaccatcacggcggctccggcatgggggcatatctggtgttcttaggtccgccgggcgcgggaaaaggtacccaaggccgtattatttcggcaaagactggcatcccgcatattagcacgggcgatatcctgcgtgacatcgtcgctaagcaaaacgatgaagtggcctcgagcattaaagagatcatgctgaaaggtgaactcgttccagatgaactgggtaatgcggtagtaaaacgccgcctgagcgagaaagactgcgaaaaaggctttattttggatggtttcccgcgtaccgtgcgccaagcggaatatctggatagttttcttgaaagccagaataaacagttgacagccgccgtgctgattgaggtccccgaagatgaagttgttgcacgtctgctgtctcgccgtatctgtccgaaatgcgggcgtagttacaacatgatttttctgccaccaaaagaagacgagctgtgtgacgattgcggtgtcggcttagtacggcgtttagatgataaggaagaaacggtccgtcaccgcctgaaagtctaccgtgaggcgacccagccggtcattgactattatagtaagaaaggtattctcgcacgcgtagatgggtcgcaaggaatcccacctatcgtggcagaagtcctggggattctgggttggagcgataag

SEQ ID NO: 1974 - protein, 231 aa, synthetic construct
  REGION 1..231: note = variant of adenylate kinase from Thermotoga neapolitana
MHHHHHHGGSGMGAYLVFLGPPGAGKGTQGRIISAKTGIPHISTGDILRDIVAKQNDEVASSIKEIMLKGELVPDELGNAVVKRRLSEKDCEKGFILDGFPRTVRQAEYLDSFLESQNKQLTAAVLIEVPEDEVVARLLSRRICPKCGRSYNMIFLPPKEDELCDDCGVGLVRRLDDKEETVRHRLKVYREATQPVIDYYSKKGILARVDGSQGIPPIVAEVLGILGWSDK

SEQ ID NO: 1975 - DNA, 693 bp, synthetic construct
  misc_feature 1..693: note = variant of adenylate kinase from Thermotoga neapolitana
  source 1..693: mol_type = other DNA
atgcaccatcatcaccatcacgggggctccggcatgggggcatatctggtgttcttaggtccgccgggcgcgggaaaaggtacccaaggccgtattatttcggcaaagactggcatcccgcatattagcacgggcgatatcctgcgtgacatcgtcgctaagcaaaacgatgaagttgcctcgagcattaaagagatcatgctgaaaggtgaactcgttccagatgaactgggtaatgcggtagtaaaacgccgcctgtcggagaaagactgcgaaaaaggctttattttggatggtttcccgcgtaccgtgcgccaagcggaatatctggatagttttcttgaaagccaggggcgccagttgacagccgccgtgctgattgaggtccccgaagatgaagttgttgcacgtctgctgtctcgccgtatctgtccgaaatgcgggcgtagttacaacatgatttttctgccaccaaaagaagacgagctgtgtgacgattgcggtgtcggcttagtacagcgtttagatgataaggaagaaacggtccgtcaccgcctgaaagtctaccgtgagaagacccagccggtcattgactattatagtaagaaaggtattctcgcacgcgtagatgggtcgcaaggaatcccacctatcgtggcagaagtcctggggattctgggttggagcgataag

SEQ ID NO: 1976 - protein, 231 aa, synthetic construct
  REGION 1..231: note = variant of adenylate kinase from Thermotoga neapolitana
MHHHHHHGGSGMGAYLVFLGPPGAGKGTQGRIISAKTGIPHISTGDILRDIVAKQNDEVASSIKEIMLKGELVPDELGNAVVKRRLSEKDCEKGFILDGFPRTVRQAEYLDSFLESQGRQLTAAVLIEVPEDEVVARLLSRRICPKCGRSYNMIFLPPKEDELCDDCGVGLVQRLDDKEETVRHRLKVYREKTQPVIDYYSKKGILARVDGSQGIPPIVAEVLGILGWSDK

SEQ ID NO: 1977 - DNA, 693 bp, synthetic construct
  misc_feature 1..693: note = variant of adenylate kinase from Thermotoga neapolitana
  source 1..693: mol_type = other DNA
atgcaccatcatcaccatcacgggggctccggcatgggggcatatctggtgttcttaggtccgccgggcgcgggaaaaggtacccaaggccgtattatttcggcaaagactggcatcccgcatattagcacgggcgatatcctgcgtgacatcgtcgctaagcaaaacgatgaagttgcctcgagcattaaagagatcatgctgaaaggtgaactcgttccagatgaactgggtaatgcggtagtaaaacgccgcctgatggagaaagactgcgaaaaaggctttattttggatggtttcccgcgtaccgtgcgccaagcggaatatctggattcgtttcttgaaagccagaataaacagttgacagccgccgtgctgattgaggtccccgaagatgaagttgttgcacgtctgctgtctcgccgtatctgtccgaaatgcgggcgtagttacaacatgatttttctgccaccaaaagaagacgagctgtgtgacgattgcggtgtcggcttagtacagcgtttagatgataaggaagaaacggtccgtcaccgcctgaaagtctaccgtgagaaaacccagccggtcattgactattatagtaagaaaggtattctcgcacgcgtagatgggtcgcaaggaatcccacctatcgtggcagaagtcctggggattctgggttggagcgataag

SEQ ID NO: 1978 - protein, 231 aa, synthetic construct
  REGION 1..231: note = variant of adenylate kinase from Thermotoga neapolitana
MHHHHHHGGSGMGAYLVFLGPPGAGKGTQGRIISAKTGIPHISTGDILRDIVAKQNDEVASSIKEIMLKGELVPDELGNAVVKRRLMEKDCEKGFILDGFPRTVRQAEYLDSFLESQNKQLTAAVLIEVPEDEVVARLLSRRICPKCGRSYNMIFLPPKEDELCDDCGVGLVQRLDDKEETVRHRLKVYREKTQPVIDYYSKKGILARVDGSQGIPPIVAEVLGILGWSDK

SEQ ID NO: 1979 - DNA, 693 bp, synthetic construct
  misc_feature 1..693: note = variant of adenylate kinase from Thermotoga neapolitana
  source 1..693: mol_type = other DNA
atgcaccatcatcaccatcacgggggctccggcatgggggcatatctggtgttattaggtccgccgggcgcgggaaaaggtacccaaggccgtattatttcggcaaagactggcatcccgcatattagcacgggcgatatcctgcgtgacatcgtcgctaagcaaaacgatgaagttgcctcgagcattaaagagatcatgctgaaaggtgaactcgttccagatgaactgggtaatgcggtagtaaaacgccgcctgtcggagaaagactgcgaaaaaggctttattttggatggtttcccgcgtaccgtgcgccaagcggaatatctggatagttttcttgaaagccagggccgccagttgacagccgccgtgctgattgaggtccccgaagatgaagttgttgcacgtctgctgtctcgccgtatctgtccgaaatgcgggcgtagttacaacatgatttttctgccaccaaaagaagacgagctgtgtgacgattgcggtgtcagcttagtacagcgtttagatgataaggaagaaacggtccgtcaccgcctgaaagtctaccgtgagaagacccagccggtcattgactattatagtaagaaaggtattctcgcacgcgtagatgggtcgcaaggaatcccacctatcgtggcagaagtcctggggattctgggttggagcgataag

SEQ ID NO: 1980 - protein, 231 aa, synthetic construct
  REGION 1..231: note = variant of adenylate kinase from Thermotoga neapolitana
MHHHHHHGGSGMGAYLVLLGPPGAGKGTQGRIISAKTGIPHISTGDILRDIVAKQNDEVASSIKEIMLKGELVPDELGNAVVKRRLSEKDCEKGFILDGFPRTVRQAEYLDSFLESQGRQLTAAVLIEVPEDEVVARLLSRRICPKCGRSYNMIFLPPKEDELCDDCGVSLVQRLDDKEETVRHRLKVYREKTQPVIDYYSKKGILARVDGSQGIPPIVAEVLGILGWSDK

SEQ ID NO: 1981 - DNA, 693 bp, synthetic construct
  misc_feature 1..693: note = variant of adenylate kinase from Thermotoga neapolitana
  source 1..693: mol_type = other DNA
atgcaccatcatcaccatcacgggggctccggcatgggggcatatctggtgctgttaggtccgccgggcgcgggaaaaggtacccaaggccgtattatttcggcaaagactggcatcccgcatattagcacgggcgatatcctgcgtgacatcgtcgctaagcaaaacgatgaagttgcctcgagcattaaagagatcatgctgaaaggtgaactcgttccagatgaactgggtaatgcggtagtaaaacgccgcctgtcggagaaagactgcgaaaaaggctttattttggatggtttcccgcgtaccgtgcgccaagcggaatatctggatagttttcttgaaagccagaatcgccagttgacagccgccgtgctgattgaggtccccgaagatgaagttgttgcacgtctgctgtctcgccgtatctgtccgaaatgcgggcgtagttacaacatgatttttctgccaccaaaagaagacgagctgtgtgacgattgcggtgtcggcttagtacagcgtttagatgataaggaagaaacggtccgtcaccgcctgaaagtctaccgtgagaagacccagccggtcattgactattatagtaagaaaggtattctcgcacgcgtagatgggtcgcaaggaatcccacctatcgtggcagaagtcctggggattctgggttggagcgataag

SEQ ID NO: 1982 - protein, 231 aa, synthetic construct
  REGION 1..231: note = variant of adenylate kinase from Thermotoga neapolitana
MHHHHHHGGSGMGAYLVLLGPPGAGKGTQGRIISAKTGIPHISTGDILRDIVAKQNDEVASSIKEIMLKGELVPDELGNAVVKRRLSEKDCEKGFILDGFPRTVRQAEYLDSFLESQNRQLTAAVLIEVPEDEVVARLLSRRICPKCGRSYNMIFLPPKEDELCDDCGVGLVQRLDDKEETVRHRLKVYREKTQPVIDYYSKKGILARVDGSQGIPPIVAEVLGILGWSDK

SEQ ID NO: 1983 - DNA, 693 bp, synthetic construct
  misc_feature 1..693: note = variant of adenylate kinase from Thermotoga neapolitana
  source 1..693: mol_type = other DNA
atgcaccatcatcaccatcacgggggctccggcatgggggcatatctggtgttcttaggtccgccgggcgcgggaaaaggtacccaaggccgtattatttcggcaaagactggcatcccgcatattagcacgggcgatatcctgcgtgacatcgtcgctaagcaaaacgatgaagttgcctcgagcattaaagagatcatgctgaaaggtgaactcgttccagatgaactgggtaatgcggtagtaaaacgccgcctgtcggagaaagactgcgaaaaaggctttattttggatggtttcccgcgtaccgtgcgccaagcggaatatctggatagttttcttgaaagccagaataagcagttgacagccgccgtgctgattgaggtccccgaagatgaagttgttgcacgtctgctgtctcgccgtatctgtccgaaatgcgggcgtagttacaacatgatttttctgccaccaaaagaagacgagctgtgtgacgattgcggtgtcggcttagtacagcgtttagatgataaggaagaaacggtccgtcaccgcctgaaagtctaccgtgagaagacccagccggtcattgactattatagtaagaaaggtattctcgcacgcgtagatgggtcgcaaggaatcccacctatcgtggcagaagtcctggggattctgggttggagcgataag

SEQ ID NO: 1984 - protein, 231 aa, synthetic construct
  REGION 1..231: note = variant of adenylate kinase from Thermotoga neapolitana
MHHHHHHGGSGMGAYLVFLGPPGAGKGTQGRIISAKTGIPHISTGDILRDIVAKQNDEVASSIKEIMLKGELVPDELGNAVVKRRLSEKDCEKGFILDGFPRTVRQAEYLDSFLESQNKQLTAAVLIEVPEDEVVARLLSRRICPKCGRSYNMIFLPPKEDELCDDCGVGLVQRLDDKEETVRHRLKVYREKTQPVIDYYSKKGILARVDGSQGIPPIVAEVLGILGWSDK

SEQ ID NO: 1985 - DNA, 693 bp, synthetic construct
  misc_feature 1..693: note = variant of adenylate kinase from Thermotoga neapolitana
  source 1..693: mol_type = other DNA
atgcaccatcatcaccatcacgggggctccggcatgggggcatatctggtgttcttaggtccgccgggcgcgggaaaaggtacccaaggccgtattatttcggcaaagactggcatcccgcatattagcacgggcgatatcctgcgtgacatcgtcgctaagcaaaacgatgaagttgcctcgagcattaaagagatcatgctgaaaggtgaactcgttccagatgaactgggtaatgcggtagtaaaacgccgcctgtcggagaaagactgcgaaaaaggctttattttggatggtttcccgcgtaccgtgcgccaagcggaatatctggatagttttcttgaaagccagaatcgccagttgacagccgccgtgctgattgaggtccccgaagatgaagttgttgcacgtctgctgtctcgccgtatctgtccgaaatgcgggcgtagttacaacatgatttttctgccaccaaaagaagacgagctgtgtgacgattgcggtgtcggcttagtacagcgtttagatgataaggaagaaacggtccgtcaccgcctgaaagtctaccgtgaggctacccagccggtcattgactattatagtaagaaaggtattctcgcacgcgtagatgggtcgcaaggaatcccacctatcgtggcagaagtcctggggattctgggttggagcgataag

SEQ ID NO: 1986 - protein, 231 aa, synthetic construct
  REGION 1..231: note = variant of adenylate kinase from Thermotoga neapolitana
MHHHHHHGGSGMGAYLVFLGPPGAGKGTQGRIISAKTGIPHISTGDILRDIVAKQNDEVASSIKEIMLKGELVPDELGNAVVKRRLSEKDCEKGFILDGFPRTVRQAEYLDSFLESQNRQLTAAVLIEVPEDEVVARLLSRRICPKCGRSYNMIFLPPKEDELCDDCGVGLVQRLDDKEETVRHRLKVYREATQPVIDYYSKKGILARVDGSQGIPPIVAEVLGILGWSDK

SEQ ID NO: 1987 - DNA, 693 bp, synthetic construct
  misc_feature 1..693: note = variant of adenylate kinase from Thermotoga neapolitana
  source 1..693: mol_type = other DNA
atgcaccatcatcaccatcacgggggctccggcatgggggcatatctggtgttcttaggtccgccgggcgcgggaaaaggtacccaaggccgtattatttcggcaaagactggcatcccgcatattagcacgggcgatatcctgcgtgacatcgtcgctaagcaaaacgatgaagttgcctcgagcattaaagagatcatgctgaaaggtgaactcgttccagatgaactgggtaatgcggtagtaaaacgccgcctggaggagaaagactgcgaaaaaggctttattttggatggtttcccgcgtaccgtgcgccaagcggaatatctggatagttttcttgaaagccagaatcgccagttgacagccgccgtgctgattgaggtccccgaagatgaagttgttgcacgtctgctgtctcgccgtatctgtccgaaatgcgggcgtagttacaacatgatttttctgccaccaaaagaagacgagctgtgtgacgattgcggtgtcggcttagtacagcgtttagatgataaggaagaaacggtccgtcaccgcctgaaagtctaccgtgagaagacccagccggtcattgactattatagtaagaaaggtattctcgcacgcgtagatgggtcgcaaggaatcccacctatcgtggcagaagtcctggggattctgggttggagcgataag

SEQ ID NO: 1988 - protein, 231 aa, synthetic construct
  REGION 1..231: note = variant of adenylate kinase from Thermotoga neapolitana
MHHHHHHGGSGMGAYLVFLGPPGAGKGTQGRIISAKTGIPHISTGDILRDIVAKQNDEVASSIKEIMLKGELVPDELGNAVVKRRLEEKDCEKGFILDGFPRTVRQAEYLDSFLESQNRQLTAAVLIEVPEDEVVARLLSRRICPKCGRSYNMIFLPPKEDELCDDCGVGLVQRLDDKEETVRHRLKVYREKTQPVIDYYSKKGILARVDGSQGIPPIVAEVLGILGWSDK

SEQ ID NO: 1989 - DNA, 693 bp, synthetic construct
  misc_feature 1..693: note = variant of adenylate kinase from Thermotoga neapolitana
  source 1..693: mol_type = other DNA
atgcaccatcatcaccatcacgggggctccggcatgggggcatatctggtgttcttaggtccgccgggcgcgggaaaaggtacccaaggccgtattatttcggcaaagactggcatcccgcatattagcacgggcgatatcctgcgtgacatcgtcgctaagcaaaacgatgaagttgcctcgagcattaaagagatcatgctgaaaggtgaactcgttccagatgaactgggtaatgcggtagtaaaacgccgcctgatggagaaagactgcgaaaaaggctttattttggatggtttcccgcgtaccgtgcgccaagcggaatatctggatagttttcttgaaagccagaatcgccagttgacagccgccgtgctgattgaggtccccgaagatgaagttgttgcacgtctgctgtctcgccgtatctgtccgaaatgcgggcgtagttacaacatgatttttctgccaccaaaagaagacgagctgtgtgacgattgcggtgtcggcttagtacagcgtttagatgataaggaagaaacggtccgtcaccgcctgaaagtctaccgtgagaagacccagccggtcattgactattatagtaagaaaggtattctcgcacgcgtagatgggtcgcaaggaatcccacctatcgtggcagaagtcctggggattctgggttggagcgataag

SEQ ID NO: 1990 - protein, 231 aa, synthetic construct
  REGION 1..231: note = variant of adenylate kinase from Thermotoga neapolitana
MHHHHHHGGSGMGAYLVFLGPPGAGKGTQGRIISAKTGIPHISTGDILRDIVAKQNDEVASSIKEIMLKGELVPDELGNAVVKRRLMEKDCEKGFILDGFPRTVRQAEYLDSFLESQNRQLTAAVLIEVPEDEVVARLLSRRICPKCGRSYNMIFLPPKEDELCDDCGVGLVQRLDDKEETVRHRLKVYREKTQPVIDYYSKKGILARVDGSQGIPPIVAEVLGILGWSDK

SEQ ID NO: 1991 - DNA, 693 bp, synthetic construct
  misc_feature 1..693: note = variant of adenylate kinase from Thermotoga neapolitana
  source 1..693: mol_type = other DNA
atgcaccatcatcaccatcacgggggctccggcatgggggcatatctggtgttcttaggtccgccgggcgcgggaaaaggtacccaaggccgtattatttcggcaaagactggcatcccgcatattagcacgggcgatatcctgcgtgacatcgtcgctaagcaaaacgatgaagttgcctcgagcattaaagagatcatgctgaaaggtgaactcgttccagatgaactgggtaatgcggtagtaaaacgccgcctgtcggagcaggactgcgaaaaaggctttattttggatggtttcccgcgtaccgtgcgccaagcggaatatctggatagttttcttgaaagccagaatcgccagttgacagccgccgtgctgattgaggtccccgaagatgaagttgttgcacgtctgctgtctcgccgtatctgtccgaaatgcgggcgtagttacaacatgatttttctgccaccaaaagaagacgagctgtgtgacgattgcggtgtcggcttagtacagcgtttagatgataaggaagaaacggtccgtcaccgcctgaaagtctaccgtgagaagacccagccggtcattgactattatagtaagaaaggtattctcgcacgcgtagatgggtcgcaaggaatcccacctatcgtggcagaagtcctggggattctgggttggagcgataag

SEQ ID NO: 1992 - protein, 231 aa, synthetic construct
  REGION 1..231: note = variant of adenylate kinase from Thermotoga neapolitana
MHHHHHHGGSGMGAYLVFLGPPGAGKGTQGRIISAKTGIPHISTGDILRDIVAKQNDEVASSIKEIMLKGELVPDELGNAVVKRRLSEQDCEKGFILDGFPRTVRQAEYLDSFLESQNRQLTAAVLIEVPEDEVVARLLSRRICPKCGRSYNMIFLPPKEDELCDDCGVGLVQRLDDKEETVRHRLKVYREKTQPVIDYYSKKGILARVDGSQGIPPIVAEVLGILGWSDK

SEQ ID NO: 1993 - DNA, 693 bp, synthetic construct
  misc_feature 1..693: note = variant of adenylate kinase from Thermotoga neapolitana
  source 1..693: mol_type = other DNA
atgcaccatcatcaccatcacgggggctccggcatgggggcatatctggtgttcttaggtccgccgggcgcgggaaaaggtacccaaggccgtattatttcggcaaagactggcatcccgcatattagcacgggcgatatcctgcgtgacatcgtcgctaagcaaaacgatgaagttgcctcgagcattaaagagatcatgctgaaaggtgaactcgttccagatgaactgggtaatgcggtagtaaaacgccgcctgtcggagaaagactgcgaaaaaggctttattttggatggtttcccgcgtaccgtgcgccaagcggaatatctggatagttttcttgaaagccagaatcgccagttgacagccgccgtgctgattgaggtccccgaagatgaagttgttgcacgtctgctgtctcgccgtatctgtccgaaatgcgggcgtagttacaacatgatttttctgccaccaaaagaagacgagctgtgtgacgattgcggtgtcggcttagtacagcgtttagatgataaggaagaaacggtccgtcaccgcctgaaagtctaccgtgagattacccagccggtcattgactattatagtaagaaaggtattctcgcacgcgtagatgggtcgcaaggaatcccacctatcgtggcagaagtcctggggattctgggttggagcgataag

SEQ ID NO: 1994 - protein, 231 aa, synthetic construct
  REGION 1..231: note = variant of adenylate kinase from Thermotoga neapolitana
MHHHHHHGGSGMGAYLVFLGPPGAGKGTQGRIISAKTGIPHISTGDILRDIVAKQNDEVASSIKEIMLKGELVPDELGNAVVKRRLSEKDCEKGFILDGFPRTVRQAEYLDSFLESQNRQLTAAVLIEVPEDEVVARLLSRRICPKCGRSYNMIFLPPKEDELCDDCGVGLVQRLDDKEETVRHRLKVYREITQPVIDYYSKKGILARVDGSQGIPPIVAEVLGILGWSDK

SEQ ID NO: 1995 - DNA, 693 bp, synthetic construct
  misc_feature 1..693: note = variant of adenylate kinase from Thermotoga neapolitana
  source 1..693: mol_type = other DNA
atgcaccatcatcaccatcacgggggctccggcatgggggcatatctggtgttcttaggtccgccgggcgcgggaaaaggtacccaaggccgtattatttcggcaaagactggcatcccgcatattagcacgggcgatatcctgcgtgacatcgtcgctaagcaaaacgatgaacttgcctcgagcattaaagagatcatgctgaaaggtgaactcgttccagatgaactgggtaatgcggtagtaaaacgccgcctgtcggagaaagactgcgaaaaaggctttattttggatggtttcccgcgtaccgtgcgccaagcggaatatctggatagttttcttgaaagccagaatcgccagttgacagccgccgtgctgattgaggtccccgaagatgaagttgttgcacgtctgctgtctcgccgtatctgtccgaaatgcgggcgtagttacaacatgatttttctgccaccaaaagaagacgagctgtgtgacgattgcggtgtcggcttagtacagcgtttagatgataaggaagaaacggtccgtcaccgcctgaaagtctaccgtgagaagacccagccggtcattgactattatagtaagaaaggtattctcgcacgcgtagatgggtcgcaaggaatcccacctatcgtggcagaagtcctggggattctgggttggagcgataag

SEQ ID NO: 1996 - protein, 231 aa, synthetic construct
  REGION 1..231: note = variant of adenylate kinase from Thermotoga neapolitana
MHHHHHHGGSGMGAYLVFLGPPGAGKGTQGRIISAKTGIPHISTGDILRDIVAKQNDELASSIKEIMLKGELVPDELGNAVVKRRLSEKDCEKGFILDGFPRTVRQAEYLDSFLESQNRQLTAAVLIEVPEDEVVARLLSRRICPKCGRSYNMIFLPPKEDELCDDCGVGLVQRLDDKEETVRHRLKVYREKTQPVIDYYSKKGILARVDGSQGIPPIVAEVLGILGWSDK

SEQ ID NO: 1997 - DNA, 693 bp, synthetic construct
  misc_feature 1..693: note = variant of adenylate kinase from Thermotoga neapolitana
  source 1..693: mol_type = other DNA
atgcaccatcatcaccatcacgggggctccggcatgggggcatatctggtgttcttaggtccgccgggcgcgggaaaaggtacccaaggccgtattatttcggcaaagactggcatcccgcatattagcacgggcgatatcctgcgtgacatcgtcgctaagcaaaacgatgaagttgcctcgagcattaaagagatcatgctgaaaggtgaactcgttccagatgaactgggtaatgcggtagtaaaacgccgcctgtcggagaaagactgcgaaaaaggctttattttggatggtttcccgcgtaccgtgcgccaagcggaatatctggatagttttcttgaaagccagaatcgccagttgacagccgccgtgctgattgaggtccccgaagatgaagttgttgcacgtctgctgtctcgccgtatctgtccgaaatgcgggcgtagttacaacatgatttttctgccaccaaaagaagacgagctgtgtgacgattgcggtgtcagtttagtacagcgtttagatgataaggaagaaacggtccgtcaccgcctgaaagtctaccgtgagaagacccagccggtcattgactattatagtaagaaaggtattctcgcacgcgtagatgggtcgcaaggaatcccacctatcgtggcagaagtcctggggattctgggttggagcgataag

SEQ ID NO: 1998 - protein, 231 aa, synthetic construct
  REGION 1..231: note = variant of adenylate kinase from Thermotoga neapolitana
MHHHHHHGGSGMGAYLVFLGPPGAGKGTQGRIISAKTGIPHISTGDILRDIVAKQNDEVASSIKEIMLKGELVPDELGNAVVKRRLSEKDCEKGFILDGFPRTVRQAEYLDSFLESQNRQLTAAVLIEVPEDEVVARLLSRRICPKCGRSYNMIFLPPKEDELCDDCGVSLVQRLDDKEETVRHRLKVYREKTQPVIDYYSKKGILARVDGSQGIPPIVAEVLGILGWSDK

SEQ ID NO: 1999 - DNA, 693 bp, synthetic construct
  misc_feature 1..693: note = variant of adenylate kinase from Thermotoga neapolitana
  source 1..693: mol_type = other DNA
atgcaccatcatcaccatcacgggggctccggcatgggggcatatctggtgttcttaggtccgccgggcgcgggaaaaggtacccaaggccgtattatttcggcaaagactggcatcccgcatattagcacgggcgatatcctgcgtgacatcgtcgctaagcaaaacgatgaagttgcctcgagcattcgtgagatcatgctgaaaggtgaactcgttccagatgaactgggtaatgcggtagtaaaacgccgcctgtcggagaaagactgcgaaaaaggctttattttggatggtttcccgcgtaccgtgcgccaagcggaatatctggatagttttcttgaaagccagaatcgccagttgacagccgccgtgctgattgaggtccccgaagatgaagttgttgcacgtctgctgtctcgccgtatctgtccgaaatgcgggcgtagttacaacatgatttttctgccaccaaaagaagacgagctgtgtgacgattgcggtgtcggcttagtacagcgtttagatgataaggaagaaacggtccgtcaccgcctgaaagtctaccgtgagaagacccagccggtcattgactattatagtaagaaaggtattctcgcacgcgtagatgggtcgcaaggaatcccacctatcgtggcagaagtcctggggattctgggttggagcgataag

SEQ ID NO: 2000 - protein, 231 aa, synthetic construct
  REGION 1..231: note = variant of adenylate kinase from Thermotoga neapolitana
MHHHHHHGGSGMGAYLVFLGPPGAGKGTQGRIISAKTGIPHISTGDILRDIVAKQNDEVASSIREIMLKGELVPDELGNAVVKRRLSEKDCEKGFILDGFPRTVRQAEYLDSFLESQNRQLTAAVLIEVPEDEVVARLLSRRICPKCGRSYNMIFLPPKEDELCDDCGVGLVQRLDDKEETVRHRLKVYREKTQPVIDYYSKKGILARVDGSQGIPPIVAEVLGILGWSDK

SEQ ID NO: 2001 - DNA, 693 bp, synthetic construct
  misc_feature 1..693: note = variant of adenylate kinase from Thermotoga neapolitana
  source 1..693: mol_type = other DNA
atgcaccatcatcaccatcacgggggctccggcatgggggcatatctggtgttcttaggtccgccgggcgcgggaaaaggtacccaaggccgtattatttcggcaaagactggcatcccgcatattagcacgggcgatatcctgcgtgacatcgtcgctaagcaaaacgatgaagttgcctcgagcattaaagagatcatgctgaaaggtgaactcgttccagatgaactgggtaatgcggtagtaaaacgccgcctgtcggagaaagactgcgaaaaaggctttattttggatggtttcccgcgtaccgtgcgccaagcggaatatctggataattttcttgaaagccagaatcgccagttgacagccgccgtgctgattgaggtccccgaagatgaagttgttgcacgtctgctgtctcgccgtatctgtccgaaatgcgggcgtagttacaacatgatttttctgccaccaaaagaagacgagctgtgtgacgattgcggtgtcggcttagtacagcgtttagatgataaggaagaaacggtccgtcaccgcctgaaagtctaccgtgagaagacccagccggtcattgactattatagtaagaaaggtattctcgcacgcgtagatgggtcgcaaggaatcccacctatcgtggcagaagtcctggggattctgggttggagcgataag

SEQ ID NO: 2002 - protein, 231 aa, synthetic construct
  REGION 1..231: note = variant of adenylate kinase from Thermotoga neapolitana
MHHHHHHGGSGMGAYLVFLGPPGAGKGTQGRIISAKTGIPHISTGDILRDIVAKQNDEVASSIKEIMLKGELVPDELGNAVVKRRLSEKDCEKGFILDGFPRTVRQAEYLDNFLESQNRQLTAAVLIEVPEDEVVARLLSRRICPKCGRSYNMIFLPPKEDELCDDCGVGLVQRLDDKEETVRHRLKVYREKTQPVIDYYSKKGILARVDGSQGIPPIVAEVLGILGWSDK

SEQ ID NO: 2003 - DNA, 693 bp, synthetic construct
  misc_feature 1..693: note = variant of adenylate kinase from Thermotoga neapolitana
  source 1..693: mol_type = other DNA
atgcaccatcatcaccatcacgggggctccggcatgggggcatatctggtgttcttaggtccgccgggcgcgggaaaaggtacccaaggccgtattatttcggcaaagactggcatcccgcatattagcacgggcgatatcctgcgtgacatcgtcgctaagcaaaacgatgaagttgcctcgagcattaaagagatcatgctgaaaggtgaactcgttccagatgaactgggtaatgcggtagtaaaacgccgcctgtcggagaaagactgcgaagagggctttattttggatggtttcccgcgtaccgtgcgccaagcggaatatctggatagttttcttgaaagccagaatcgccagttgacagccgccgtgctgattgaggtccccgaagatgaagttgttgcacgtctgctgtctcgccgtatctgtccgaaatgcgggcgtagttacaacatgatttttctgccaccaaaagaagacgagctgtgtgacgattgcggtgtcggcttagtacagcgtttagatgataaggaagaaacggtccgtcaccgcctgaaagtctaccgtgagaagacccagccggtcattgactattatagtaagaaaggtattctcgcacgcgtagatgggtcgcaaggaatcccacctatcgtggcagaagtcctggggattctgggttggagcgataag

SEQ ID NO: 2004 - protein, 231 aa, synthetic construct
  REGION 1..231: note = variant of adenylate kinase from Thermotoga neapolitana
MHHHHHHGGSGMGAYLVFLGPPGAGKGTQGRIISAKTGIPHISTGDILRDIVAKQNDEVASSIKEIMLKGELVPDELGNAVVKRRLSEKDCEEGFILDGFPRTVRQAEYLDSFLESQNRQLTAAVLIEVPEDEVVARLLSRRICPKCGRSYNMIFLPPKEDELCDDCGVGLVQRLDDKEETVRHRLKVYREKTQPVIDYYSKKGILARVDGSQGIPPIVAEVLGILGWSDK

SEQ ID NO: 2005 - DNA, 693 bp, synthetic construct
  misc_feature 1..693: note = variant of adenylate kinase from Thermotoga neapolitana
  source 1..693: mol_type = other DNA
atgcaccatcatcaccatcacgggggctccggcatgggggcatatctggtgttcttaggtccgccgggcgcgggaaaaggtacccaaggccgtattatttcggcaaagactggcatcccgcatattagcacgggcgatatcctgcgtgacatcgtcgctaagcaaaacgatgaagttgcctcgagcattaaagagatcatgctgaaaggtgaactcgttccagatgaactgggtaatgcggtagtaaaacgccgcctgtcggagaaagactgcgaaaaaggctttattttggatggtttcccgcgtaccgtgcgccaagcggaatatctggatagttttcttgaaagccagaatcgccagttgacagccgccgtgctgattgaggtccccgaagatgaagttgttgcacgtctgctgtctcgccgtatctgtccgaaatgcgggcgtagttacaacatgatttttctgccaccaaaagaagacgagctgtgtgacgattgcggtgtcggcttagtacagcgtttagatgataaggaagaaacggtccgtagtcgcctgaaagtctaccgtgagaagacccagccggtcattgactattatagtaagaaaggtattctcgcacgcgtagatgggtcgcaaggaatcccacctatcgtggcagaagtcctggggattctgggttggagcgataag

SEQ ID NO: 2006 - protein, 231 aa, synthetic construct
  REGION 1..231: note = variant of adenylate kinase from Thermotoga neapolitana
MHHHHHHGGSGMGAYLVFLGPPGAGKGTQGRIISAKTGIPHISTGDILRDIVAKQNDEVASSIKEIMLKGELVPDELGNAVVKRRLSEKDCEKGFILDGFPRTVRQAEYLDSFLESQNRQLTAAVLIEVPEDEVVARLLSRRICPKCGRSYNMIFLPPKEDELCDDCGVGLVQRLDDKEETVRSRLKVYREKTQPVIDYYSKKGILARVDGSQGIPPIVAEVLGILGWSDK

SEQ ID NO: 2007 - DNA, 693 bp, synthetic construct
  misc_feature 1..693: note = variant of adenylate kinase from Thermotoga neapolitana
  source 1..693: mol_type = other DNA
atgcaccatcatcaccatcacgggggctccggcatgggggcatatctggtgttcttaggtccgccgggcgcgggaaaaggtacccaaggccgtattatttcggcaaagactggcatcccgcatattagcacgggcgatatcctgcgtgacatcgtcgctaagcaaaacgatgaagttgcctcgagcattaaagagatcatgctgaaaggtgaactcgttccagatgaactgggtaatgcggtagtaaaacgccgcctgtcggagaaagactgcgaaaaaggctttattttggatggtttcccgcgtaccgtgcgccaagcggaatatctggatagttttcttgaaagccagaatcgccagttgacagccgccgtgctgattgaggtccccgaagatgaagttgttgcacgtctgctgtctcgccgtatctgtccgaattgcgggcgtagttacaacatgatttttctgccaccaaaagaagacgagctgtgtgacgattgcggtgtcggcttagtacagcgtttagatgataaggaagaaacggtccgtcaccgcctgaaagtctaccgtgagaagacccagccggtcattgactattatagtaagaaaggtattctcgcacgcgtagatgggtcgcaaggaatcccacctatcgtggcagaagtcctggggattctgggttggagcgataag

SEQ ID NO: 2008 - protein, 231 aa, synthetic construct
  REGION 1..231: note = variant of adenylate kinase from Thermotoga neapolitana
MHHHHHHGGSGMGAYLVFLGPPGAGKGTQGRIISAKTGIPHISTGDILRDIVAKQNDEVASSIKEIMLKGELVPDELGNAVVKRRLSEKDCEKGFILDGFPRTVRQAEYLDSFLESQNRQLTAAVLIEVPEDEVVARLLSRRICPNCGRSYNMIFLPPKEDELCDDCGVGLVQRLDDKEETVRHRLKVYREKTQPVIDYYSKKGILARVDGSQGIPPIVAEVLGILGWSDK

SEQ ID NO: 2009 - DNA, 693 bp, synthetic construct
  misc_feature 1..693: note = variant of adenylate kinase from Thermotoga neapolitana
  source 1..693: mol_type = other DNA
atgcaccatcatcaccatcacgggggctccggcatgggggcatatctggtgttcttaggtccgccgggcgcgggaaaaggtacccaaggccgtattatttcggcaaagactggcatcccgcatattagcacgggcgatatcctgcgtgacatcgtcgctaagcaaaacgatgaagttgcctcgagcattaaagagatcatgctgaaaggtgaactcgttccagatgaactgggtaatgcggtagtaaaacgccgcctgtcggagaaagactgcgaaaaaggctttattttggatggtttcccgcgtaccgtgcgccaagcggaatatctggataagtttcttgaaagccagaatcgccagttgacagccgccgtgctgattgaggtccccgaagatgaagttgttgcacgtctgctgtctcgccgtatctgtccgaaatgcgggcgtagttacaacatgatttttctgccaccaaaagaagacgagctgtgtgacgattgcggtgtcggcttagtacagcgtttagatgataaggaagaaacggtccgtcaccgcctgaaagtctaccgtgagaagacccagccggtcattgactattatagtaagaaaggtattctcgcacgcgtagatgggtcgcaaggaatcccacctatcgtggcagaagtcctggggattctgggttggagcgataag

SEQ ID NO: 2010 - protein, 231 aa, synthetic construct
  REGION 1..231: note = variant of adenylate kinase from Thermotoga neapolitana
MHHHHHHGGSGMGAYLVFLGPPGAGKGTQGRIISAKTGIPHISTGDILRDIVAKQNDEVASSIKEIMLKGELVPDELGNAVVKRRLSEKDCEKGFILDGFPRTVRQAEYLDKFLESQNRQLTAAVLIEVPEDEVVARLLSRRICPKCGRSYNMIFLPPKEDELCDDCGVGLVQRLDDKEETVRHRLKVYREKTQPVIDYYSKKGILARVDGSQGIPPIVAEVLGILGWSDK

SEQ ID NO: 2011 - DNA, 693 bp, synthetic construct
  misc_feature 1..693: note = variant of adenylate kinase from Thermotoga neapolitana
  source 1..693: mol_type = other DNA
atgcaccatcatcaccatcacgggggctccggcatgggggcatatctggtgttcttaggtccgccgggcgcgggaaaaggtacccaaggccgtattatttcggcaaagactggcatcccgcatattagcacgggcgatatcctgcgtgacactgtcgctaagcaaaacgatgaagttgcctcgagcattaaagagatcatgctgaaaggtgaactcgttccagatgaactgggtaatgcggtagtaaaacgccgcctgtcggagaaagactgcgaaaaaggctttattttggatggtttcccgcgtaccgtgcgccaagcggaatatctggatagttttcttgaaagccagaatcgccagttgacagccgccgtgctgattgaggtccccgaagatgaagttgttgcacgtctgctgtctcgccgtatctgtccgaaatgcgggcgtagttacaacatgatttttctgccaccaaaagaagacgagctgtgtgacgattgcggtgtcggcttagtacagcgtttagatgataaggaagaaacggtccgtcaccgcctgaaagtctaccgtgagaagacccagccggtcattgactattatagtaagaaaggtattctcgcacgcgtagatgggtcgcaaggaatcccacctatcgtggcagaagtcctggggattctgggttggagcgataag

SEQ ID NO: 2012 - protein, 231 aa, synthetic construct
  REGION 1..231: note = variant of adenylate kinase from Thermotoga neapolitana
MHHHHHHGGSGMGAYLVFLGPPGAGKGTQGRIISAKTGIPHISTGDILRDTVAKQNDEVASSIKEIMLKGELVPDELGNAVVKRRLSEKDCEKGFILDGFPRTVRQAEYLDSFLESQNRQLTAAVLIEVPEDEVVARLLSRRICPKCGRSYNMIFLPPKEDELCDDCGVGLVQRLDDKEETVRHRLKVYREKTQPVIDYYSKKGILARVDGSQGIPPIVAEVLGILGWSDK

SEQ ID NO: 2013 - DNA, 693 bp, synthetic construct
  misc_feature 1..693: note = variant of adenylate kinase from Thermotoga neapolitana
  source 1..693: mol_type = other DNA
atgcaccatcatcaccatcacgggggctccggcatgggggcatatctggtgttcttaggtccgccgggcgcgggaaaaggtacccaaggccgtattatttcggcaaagactggcatcccgcatattagcacgggcgatatcctgcgtgacatcgtcgctaagcaaaacgatgaagttgcctcgagcattaaagagatcatgctgaaaggtgaactcgttccagatgaactgggtaatgcggtagtaaaacgccgcctgtcggagaaagactgcgaaaaaggctttattttggatggtttcccgcgtaccgtgcgccaagcggaatatctggatagttttcttgaaagccagaatcgccagttgacagccgccattctgattgaggtccccgaagatgaagttgttgcacgtctgctgtctcgccgtatctgtccgaaatgcgggcgtagttacaacatgatttttctgccaccaaaagaagacgagctgtgtgacgattgcggtgtcggcttagtacagcgtttagatgataaggaagaaacggtccgtcaccgcctgaaagtctaccgtgagaagacccagccggtcattgactattatagtaagaaaggtattctcgcacgcgtagatgggtcgcaaggaatcccacctatcgtggcagaagtcctggggattctgggttggagcgataag

SEQ ID NO: 2014 - protein, 231 aa, synthetic construct
  REGION 1..231: note = variant of adenylate kinase from Thermotoga neapolitana
MHHHHHHGGSGMGAYLVFLGPPGAGKGTQGRIISAKTGIPHISTGDILRDIVAKQNDEVASSIKEIMLKGELVPDELGNAVVKRRLSEKDCEKGFILDGFPRTVRQAEYLDSFLESQNRQLTAAILIEVPEDEVVARLLSRRICPKCGRSYNMIFLPPKEDELCDDCGVGLVQRLDDKEETVRHRLKVYREKTQPVIDYYSKKGILARVDGSQGIPPIVAEVLGILGWSDK

SEQ ID NO: 2015 - DNA, 693 bp, synthetic construct
  misc_feature 1..693: note = variant of adenylate kinase from Thermotoga neapolitana
  source 1..693: mol_type = other DNA
atgcaccatcatcaccatcacgggggctccggcatgggggcatatctggtgttcttaggtccgccgggcgcgggaaaaggtacccaaggccgtattatttcggcaaagactggcatcccgcatattagcacgggcgatatcctgcgtgacatcgtcgctaagcaaaacgatgaagttgcctcgagcattaaagagatcatgctgaaaggtgaactcgttccagatgaactgggtaatgcggtagtaaaacgccgcctgtcggagaaagactgcgaaagtggctttattttggatggtttcccgcgtaccgtgcgccaagcggaatatctggatagttttcttgaaagccagaatcgccagttgacagccgccgtgctgattgaggtccccgaagatgaagttgttgcacgtctgctgtctcgccgtatctgtccgaaatgcgggcgtagttacaacatgatttttctgccaccaaaagaagacgagctgtgtgacgattgcggtgtcggcttagtacagcgtttagatgataaggaagaaacggtccgtcaccgcctgaaagtctaccgtgagaagacccagccggtcattgactattatagtaagaaaggtattctcgcacgcgtagatgggtcgcaaggaatcccacctatcgtggcagaagtcctggggattctgggttggagcgataag

SEQ ID NO: 2016 - protein, 231 aa, synthetic construct
  REGION 1..231: note = variant of adenylate kinase from Thermotoga neapolitana
MHHHHHHGGSGMGAYLVFLGPPGAGKGTQGRIISAKTGIPHISTGDILRDIVAKQNDEVASSIKEIMLKGELVPDELGNAVVKRRLSEKDCESGFILDGFPRTVRQAEYLDSFLESQNRQLTAAVLIEVPEDEVVARLLSRRICPKCGRSYNMIFLPPKEDELCDDCGVGLVQRLDDKEETVRHRLKVYREKTQPVIDYYSKKGILARVDGSQGIPPIVAEVLGILGWSDK

SEQ ID NO: 2017 - DNA, 693 bp, synthetic construct
  misc_feature 1..693: note = variant of adenylate kinase from Thermotoga neapolitana
  source 1..693: mol_type = other DNA
atgcaccatcatcaccatcacgggggctccggcatgggggcatatctggtgttcttaggtccgccgggcgcgggaaaaggtacccaaggccgtattatttcggcaaagactggcatcccgcatattagcacgggcgatatcctgcgtgacatcgtcgctaagcaaaacgatgaagttgcctcgagcattaaagagatcatgctgaaaggtgaactcgttccagatgaactgggtaatgcggtagtaaaacgccgcctgtcggagaaagactgcgaaaaaggctttattttggatggtttcccgcgtaccgtgcgccaagcggaatatctggatagttttcttgaaagccagaatcgccagttgacagccgccgtgctgattgaggtccccgaagatgaagttgttgcacgtctgctgtctcgccgtatctgtccgaaatgcgggcgtagttacaacatgatttttctgccaccaaaagaagacgagctgtgtgacgattgcggtgtcggcttagtacagcgtttagatgataaggaagaaacggtccgtcaccgcctgaaagtctaccgtgagtggacccagccggtcattgactattatagtaagaaaggtattctcgcacgcgtagatgggtcgcaaggaatcccacctatcgtggcagaagtcctggggattctgggttggagcgataag

SEQ ID NO: 2018 - protein, 231 aa, synthetic construct
  REGION 1..231: note = variant of adenylate kinase from Thermotoga neapolitana
MHHHHHHGGSGMGAYLVFLGPPGAGKGTQGRIISAKTGIPHISTGDILRDIVAKQNDEVASSIKEIMLKGELVPDELGNAVVKRRLSEKDCEKGFILDGFPRTVRQAEYLDSFLESQNRQLTAAVLIEVPEDEVVARLLSRRICPKCGRSYNMIFLPPKEDELCDDCGVGLVQRLDDKEETVRHRLKVYREWTQPVIDYYSKKGILARVDGSQGIPPIVAEVLGILGWSDK

SEQ ID NO: 2019 - DNA, 693 bp, synthetic construct
  misc_feature 1..693: note = variant of adenylate kinase from Thermotoga neapolitana
  source 1..693: mol_type = other DNA
atgcaccatcatcaccatcacgggggctccggcatgggggcatatctggtgttcttaggtccgccgggcgcgggaaaaggtacccaaggccgtattatttcggcaaagactggcatcccgcatattagcacgggcgatatcctgcgtgacatcgtcgctaagcaaaacgatgaagttgcctcgagcattaaagagatcatgctgaaaggtgaactcgttccagatgaactgggtaatgcggtagtaaaacgccgcctgtcggagaaagactgcgaaaaaggctttattttggatggtttcccgcgtaccgtgcgccaagcggaatatctggatgcttttcttgaaagccagaatcgccagttgacagccgccgtgctgattgaggtccccgaagatgaagttgttgcacgtctgctgtctcgccgtatctgtccgaaatgcgggcgtagttacaacatgatttttctgccaccaaaagaagacgagctgtgtgacgattgcggtgtcggcttagtacagcgtttagatgataaggaagaaacggtccgtcaccgcctgaaagtctaccgtgagaagacccagccggtcattgactattatagtaagaaaggtattctcgcacgcgtagatgggtcgcaaggaatcccacctatcgtggcagaagtcctggggattctgggttggagcgataag

SEQ ID NO: 2020 - protein, 231 aa, synthetic construct
  REGION 1..231: note = variant of adenylate kinase from Thermotoga neapolitana
MHHHHHHGGSGMGAYLVFLGPPGAGKGTQGRIISAKTGIPHISTGDILRDIVAKQNDEVASSIKEIMLKGELVPDELGNAVVKRRLSEKDCEKGFILDGFPRTVRQAEYLDAFLESQNRQLTAAVLIEVPEDEVVARLLSRRICPKCGRSYNMIFLPPKEDELCDDCGVGLVQRLDDKEETVRHRLKVYREKTQPVIDYYSKKGILARVDGSQGIPPIVAEVLGILGWSDK

SEQ ID NO: 2021 - DNA, 693 bp, synthetic construct
  misc_feature 1..693: note = variant of adenylate kinase from Thermotoga neapolitana
  source 1..693: mol_type = other DNA
atgcaccatcatcaccatcacgggggctccggcatgggggcatatctggtgttcttaggtccgccgggcgcgggaaaaggtacccaaggccgtattatttcggcaaagactggcatcccgcatattagcacgggcgatatcctgcgtgacatcgtcgctaagcaaaacgatgaagttgcctcgagcattaaagagatcatgctgaaaggtgaactcgttccagatgaactgggtaatgcggtagtaaaacgccgcctgtcggagaaagactgcgaaaaaggctttattttggatggtttcccgcgtaccgtgcgccaagcggaatatctggatagttttcttgaaagccagaatcgccagttgacagccgccgtgctgattgaggtccccgaagatgaagttgttgcacgtctgctgtctcgccgtatctgtccgaaatgcgggcgtagttacaacatgatttttctgccaccaaaagaagacgagctgtgtgacgattgcggtgtcggcttagtacagcgtttagatgataaggaagaaacggtccgtcaccgcctgaaagtctaccgtgataagacccagccggtcattgactattatagtaagaaaggtattctcgcacgcgtagatgggtcgcaaggaatcccacctatcgtggcagaagtcctggggattctgggttggagcgataag

SEQ ID NO: 2022 - protein, 231 aa, synthetic construct
  REGION 1..231: note = variant of adenylate kinase from Thermotoga neapolitana
MHHHHHHGGSGMGAYLVFLGPPGAGKGTQGRIISAKTGIPHISTGDILRDIVAKQNDEVASSIKEIMLKGELVPDELGNAVVKRRLSEKDCEKGFILDGFPRTVRQAEYLDSFLESQNRQLTAAVLIEVPEDEVVARLLSRRICPKCGRSYNMIFLPPKEDELCDDCGVGLVQRLDDKEETVRHRLKVYRDKTQPVIDYYSKKGILARVDGSQGIPPIVAEVLGILGWSDK

SEQ ID NO: 2023 - DNA, 693 bp, synthetic construct
  misc_feature 1..693: note = variant of adenylate kinase from Thermotoga neapolitana
  source 1..693: mol_type = other DNA
atgcaccatcatcaccatcacgggggctccggcatgggggcatatctggtgttcttaggtccgccgggcgcgggaaaaggtacccaaggccgtattatttcggcaaagactggcatcccgcatattagcacgggcgatatcctgcgtgacatggtcgctaagcaaaacgatgaagttgcctcgagcattaaagagatcatgctgaaaggtgaactcgttccagatgaactgggtaatgcggtagtaaaacgccgcctgtcggagaaagactgcgaaaaaggctttattttggatggtttcccgcgtaccgtgcgccaagcggaatatctggatagttttcttgaaagccagaatcgccagttgacagccgccgtgctgattgaggtccccgaagatgaagttgttgcacgtctgctgtctcgccgtatctgtccgaaatgcgggcgtagttacaacatgatttttctgccaccaaaagaagacgagctgtgtgacgattgcggtgtcggcttagtacagcgtttagatgataaggaagaaacggtccgtcaccgcctgaaagtctaccgtgagaagacccagccggtcattgactattatagtaagaaaggtattctcgcacgcgtagatgggtcgcaaggaatcccacctatcgtggcagaagtcctggggattctgggttggagcgataag

SEQ ID NO: 2024 - protein, 231 aa, synthetic construct
  REGION 1..231: note = variant of adenylate kinase from Thermotoga neapolitana
MHHHHHHGGSGMGAYLVFLGPPGAGKGTQGRIISAKTGIPHISTGDILRDMVAKQNDEVASSIKEIMLKGELVPDELGNAVVKRRLSEKDCEKGFILDGFPRTVRQAEYLDSFLESQNRQLTAAVLIEVPEDEVVARLLSRRICPKCGRSYNMIFLPPKEDELCDDCGVGLVQRLDDKEETVRHRLKVYREKTQPVIDYYSKKGILARVDGSQGIPPIVAEVLGILGWSDK

SEQ ID NO: 2025 - DNA, 693 bp, synthetic construct
  misc_feature 1..693: note = variant of adenylate kinase from Thermotoga neapolitana
  source 1..693: mol_type = other DNA
atgcaccatcatcaccatcacgggggctccggcatgggggcatatctggtgttcttaggtccgccgggcgcgggaaaaggtacccaaggccgtattatttcggcaaagactggcatcccgcatattagcacgggcgatatcctgcgtgacatcgtcgctaagcaaaacgatgaagttgcctcgagcattaaagagatcatgctgaaaggtgaactcgttccagatgaactgggtaatgcggtagtaaaacgccgcctgtcggagaaagactgcgaaaaaggctttattttggatggtttcccgcgtaccgtgcgccaagcggaatatctggatagttttcttgaaagcttgaatcgccagttgacagccgccgtgctgattgaggtccccgaagatgaagttgttgcacgtctgctgtctcgccgtatctgtccgaaatgcgggcgtagttacaacatgatttttctgccaccaaaagaagacgagctgtgtgacgattgcggtgtcggcttagtacagcgtttagatgataaggaagaaacggtccgtcaccgcctgaaagtctaccgtgagaagacccagccggtcattgactattatagtaagaaaggtattctcgcacgcgtagatgggtcgcaaggaatcccacctatcgtggcagaagtcctggggattctgggttggagcgataag

SEQ ID NO: 2026 - protein, 231 aa, synthetic construct
  REGION 1..231: note = variant of adenylate kinase from Thermotoga neapolitana
MHHHHHHGGSGMGAYLVFLGPPGAGKGTQGRIISAKTGIPHISTGDILRDIVAKQNDEVASSIKEIMLKGELVPDELGNAVVKRRLSEKDCEKGFILDGFPRTVRQAEYLDSFLESLNRQLTAAVLIEVPEDEVVARLLSRRICPKCGRSYNMIFLPPKEDELCDDCGVGLVQRLDDKEETVRHRLKVYREKTQPVIDYYSKKGILARVDGSQGIPPIVAEVLGILGWSDK

SEQ ID NO: 2027 - DNA, 693 bp, synthetic construct
  misc_feature 1..693: note = variant of adenylate kinase from Thermotoga neapolitana
  source 1..693: mol_type = other DNA
atgcaccatcatcaccatcacgggggctccggcatgggggcatatctggtgttcttaggtccgccgggcgcgggaaaaggtacccaaggccgtattatttcggcaaagactggcatcccgcatattagcacgggcgatatcctgcgtgacatcgtcgctaagcaaaacgatgaagttgcctcgagcattaaagagatcatgctgaaaggtgaactcgttccagatgaactgggtaatgcggtagtaaaacgccgcctgtcggagaaagactgcgaatatggctttattttggatggtttcccgcgtaccgtgcgccaagcggaatatctggatagttttcttgaaagccagaatcgccagttgacagccgccgtgctgattgaggtccccgaagatgaagttgttgcacgtctgctgtctcgccgtatctgtccgaaatgcgggcgtagttacaacatgatttttctgccaccaaaagaagacgagctgtgtgacgattgcggtgtcggcttagtacagcgtttagatgataaggaagaaacggtccgtcaccgcctgaaagtctaccgtgagaagacccagccggtcattgactattatagtaagaaaggtattctcgcacgcgtagatgggtcgcaaggaatcccacctatcgtggcagaagtcctggggattctgggttggagcgataag

SEQ ID NO: 2028 - protein, 231 aa, synthetic construct
  REGION 1..231: note = variant of adenylate kinase from Thermotoga neapolitana
MHHHHHHGGSGMGAYLVFLGPPGAGKGTQGRIISAKTGIPHISTGDILRDIVAKQNDEVASSIKEIMLKGELVPDELGNAVVKRRLSEKDCEYGFILDGFPRTVRQAEYLDSFLESQNRQLTAAVLIEVPEDEVVARLLSRRICPKCGRSYNMIFLPPKEDELCDDCGVGLVQRLDDKEETVRHRLKVYREKTQPVIDYYSKKGILARVDGSQGIPPIVAEVLGILGWSDK

SEQ ID NO: 2029 - DNA, 693 bp, synthetic construct
  misc_feature 1..693: note = variant of adenylate kinase from Thermotoga neapolitana
  source 1..693: mol_type = other DNA
atgcaccatcatcaccatcacgggggctccggcatgggggcatatctggtgttcttaggtccgccgggcgcgggaaaaggtacccaaggccgtattatttcggcaaagactggcatcccgcatattagcacgggcgatatcctgcgtgacatcgtcgctaagcaaaacgatgaagttgcctcgagcattaaagagatcatgctgaaaggtgaactcgttccagatgaactgggtaatgcggtagtaaaacgccgcctgtcggagaaagactgcgaaaaaggctttattttggatggtttcccgcgtaccgtgcgccaagcggaatatctggatagttttcttgaaagccagaatcgccagttgacagccgccgtgctgattgaggtccccgaagatgaagttgttgcacgtctgctgtctcgccgtatctgtccgaaatgcgggcgtagttacaacatgatttttctgccaccaaaagaagacgagctgtgtgacgattgcggtgtcggcttaacgcagcgtttagatgataaggaagaaacggtccgtcaccgcctgaaagtctaccgtgagaagacccagccggtcattgactattatagtaagaaaggtattctcgcacgcgtagatgggtcgcaaggaatcccacctatcgtggcagaagtcctggggattctgggttggagcgataag

SEQ ID NO: 2030 - protein, 231 aa, synthetic construct
  REGION 1..231: note = variant of adenylate kinase from Thermotoga neapolitana
MHHHHHHGGSGMGAYLVFLGPPGAGKGTQGRIISAKTGIPHISTGDILRDIVAKQNDEVASSIKEIMLKGELVPDELGNAVVKRRLSEKDCEKGFILDGFPRTVRQAEYLDSFLESQNRQLTAAVLIEVPEDEVVARLLSRRICPKCGRSYNMIFLPPKEDELCDDCGVGLTQRLDDKEETVRHRLKVYREKTQPVIDYYSKKGILARVDGSQGIPPIVAEVLGILGWSDK

SEQ ID NO: 2031 - DNA, 693 bp, synthetic construct
  misc_feature 1..693: note = variant of adenylate kinase from Thermotoga neapolitana
  source 1..693: mol_type = other DNA
atgcaccatcatcaccatcacgggggctccggcatgggggcatatctggtgttcttaggtccgccgggcgcgggaaaaggtacccaaggccgtattatttcggcaaagactggcatcccgcatattagcacgggcgatatcctgcgtgacatcgtcgctaagcaaaacgatgaagttgcctcgagcattaaagagatcatgctgaaaggtgaactcgttccagatgaactgggtaatgcggtagtaaaacgccgcctgtcggagaaagactgcgaaaaaggctttattttggatggtttcccgcgtaccgtgcgccaagcggaatatctggatagttttcttgaaagccagaatcgccagttgacagccgccgtgctgattgaggtccccgaagatgaagttgttgcacgtctgctgtctcgccgtatctgtccgaaatgcgggcgtagttacaacatgatttttctgccaccaaaagaagacgagcagtgtgacgattgcggtgtcggcttagtacagcgtttagatgataaggaagaaacggtccgtcaccgcctgaaagtctaccgtgagaagacccagccggtcattgactattatagtaagaaaggtattctcgcacgcgtagatgggtcgcaaggaatcccacctatcgtggcagaagtcctggggattctgggttggagcgataag

SEQ ID NO: 2032 - protein, 231 aa, synthetic construct
  REGION 1..231: note = variant of adenylate kinase from Thermotoga neapolitana
MHHHHHHGGSGMGAYLVFLGPPGAGKGTQGRIISAKTGIPHISTGDILRDIVAKQNDEVASSIKEIMLKGELVPDELGNAVVKRRLSEKDCEKGFILDGFPRTVRQAEYLDSFLESQNRQLTAAVLIEVPEDEVVARLLSRRICPKCGRSYNMIFLPPKEDEQCDDCGVGLVQRLDDKEETVRHRLKVYREKTQPVIDYYSKKGILARVDGSQGIPPIVAEVLGILGWSDK

SEQ ID NO: 2033 - DNA, 693 bp, synthetic construct
  misc_feature 1..693: note = variant of adenylate kinase from Thermotoga neapolitana
  source 1..693: mol_type = other DNA
atgcaccatcatcaccatcacgggggctccggcatgggggcatatctggtgttattaggtccgccgggcgcgggaaaaggtacccaaggccgtattatttcggcaaagactggcatcccgcatattagcacgggcgatatcctgcgtgacatcgtcgctaagcaaaacgatgaagtggcctcgagcattaaagagatcatgctgaaaggtgaactcgttccagatgaactgggtaatgcggtagtaaaacgccgcctggaagagaaagactgcgaaaaaggctttattttggatggtttcccgcgtaccgtgcgccaagcggaatatctggatagttttcttgaaagccagggcaaacagttgacagccgccgtgctgattgaggtccccgaagatgaagttgttgcacgtctgctgtctcgccgtatctgtccgaaatgcgggcgtagttacaacatgatttttctgccaccaaaagaagacgagctgtgtgacgattgcggtgtcagcttagtacagcgtttagatgataaggaagaaacggtccgtcaccgcctgaaagtctaccgtgaggcgacccagccggtcattgactattatagtaagaaaggtattctcgcacgcgtagatgggtcgcaaggaatcccacctatcgtggcagaagtcctggggattctgggttggagcgataag

SEQ ID NO: 2034 - protein, 231 aa, synthetic construct
  REGION 1..231: note = variant of adenylate kinase from Thermotoga neapolitana
MHHHHHHGGSGMGAYLVLLGPPGAGKGTQGRIISAKTGIPHISTGDILRDIVAKQNDEVASSIKEIMLKGELVPDELGNAVVKRRLEEKDCEKGFILDGFPRTVRQAEYLDSFLESQGKQLTAAVLIEVPEDEVVARLLSRRICPKCGRSYNMIFLPPKEDELCDDCGVSLVQRLDDKEETVRHRLKVYREATQPVIDYYSKKGILARVDGSQGIPPIVAEVLGILGWSDK

SEQ ID NO: 2035 - DNA, 693 bp, synthetic construct
  misc_feature 1..693: note = variant of adenylate kinase from Thermotoga neapolitana
  source 1..693: mol_type = other DNA
atgcaccatcatcaccatcacgggggctccggcatgggggcatatctggtgttattaggtccgccgggcgcgggaaaaggtacccaaggccgtattatttcggcaaagactggcatcccgcatattagcacgggcgatatcctgcgtgacatcgtcgctaagcaaaacgatgaagtggcctcgagcattaaagagatcatgctgaaaggtgaactcgttccagatgaactgggtaatgcggtagtaaaacgccgcctggaagagaaagactgcgaaaaaggctttattttggatggtttcccgcgtaccgtgcgccaagcggaatatctggatagttttcttgaaagccagggccgccagttgacagccgccgtgctgattgaggtccccgaagatgaagttgttgcacgtctgctgtctcgccgtatctgtccgaaatgcgggcgtagttacaacatgatttttctgccaccaaaagaagacgagctgtgtgacgattgcggtgtcagcttagtacagcgtttagatgataaggaagaaacggtccgtcaccgcctgaaagtctaccgtgaggcgacccagccggtcattgactattatagtaagaaaggtattctcgcacgcgtagatgggtcgcaaggaatcccacctatcgtggcagaagtcctggggattctgggttggagcgataag

SEQ ID NO: 2036 - protein, 231 aa, synthetic construct
  REGION 1..231: note = variant of adenylate kinase from Thermotoga neapolitana
MHHHHHHGGSGMGAYLVLLGPPGAGKGTQGRIISAKTGIPHISTGDILRDIVAKQNDEVASSIKEIMLKGELVPDELGNAVVKRRLEEKDCEKGFILDGFPRTVRQAEYLDSFLESQGRQLTAAVLIEVPEDEVVARLLSRRICPKCGRSYNMIFLPPKEDELCDDCGVSLVQRLDDKEETVRHRLKVYREATQPVIDYYSKKGILARVDGSQGIPPIVAEVLGILGWSDK

SEQ ID NO: 2037 - DNA, 693 bp, synthetic construct
  misc_feature 1..693: note = variant of adenylate kinase from Thermotoga neapolitana
  source 1..693: mol_type = other DNA
atgcaccatcatcaccatcacgggggctccggcatgggggcatatctggtgttattaggtccgccgggcgcgggaaaaggtacccaaggccgtattatttcggcaaagactggcatcccgcatattagcacgggcgatatcctgcgtgacatcgtcgctaagcaaaacgatgaagtggcctcgagcattaaagagatcatgctgaaaggtgaactcgttccagatgaactgggtaatgcggtagtaaaacgccgcctggaagagaaagactgcgaaaaaggctttattttggatggtttcccgcgtaccgtgcgccaagcggaatatctggatagttttcttgaaagccagggcaaacagttgacagccgccgtgctgattgaggtccccgaagatgaagttgttgcacgtctgctgtctcgccgtatctgtccgaaatgcgggcgtagttacaacatgatttttctgccaccaaaagaagacgagctgtgtgacgattgcggtgtcagcttagtacagcgtttagatgataaggaagaaacggtccgtcaccgcctgaaagtctaccgtgagaagacccagccggtcattgactattatagtaagaaaggtattctcgcacgcgtagatgggtcgcaaggaatcccacctatcgtggcagaagtcctggggattctgggttggagcgataag

SEQ ID NO: 2038 - protein, 231 aa, synthetic construct
  REGION 1..231: note = variant of adenylate kinase from Thermotoga neapolitana
MHHHHHHGGSGMGAYLVLLGPPGAGKGTQGRIISAKTGIPHISTGDILRDIVAKQNDEVASSIKEIMLKGELVPDELGNAVVKRRLEEKDCEKGFILDGFPRTVRQAEYLDSFLESQGKQLTAAVLIEVPEDEVVARLLSRRICPKCGRSYNMIFLPPKEDELCDDCGVSLVQRLDDKEETVRHRLKVYREKTQPVIDYYSKKGILARVDGSQGIPPIVAEVLGILGWSDK

SEQ ID NO: 2039 - DNA, 693 bp, synthetic construct
  misc_feature 1..693: note = variant of adenylate kinase from Thermotoga neapolitana
  source 1..693: mol_type = other DNA
atgcaccatcatcaccatcacgggggctccggcatgggggcatatctggtgttattaggtccgccgggcgcgggaaaaggtacccaaggccgtattatttcggcaaagactggcatcccgcatattagcacgggcgatatcctgcgtgacatcgtcgctaagcaaaacgatgaagttgcctcgagcattaaagagatcatgctgaaaggtgaactcgttccagatgaactgggtaatgcggtagtaaaacgccgcctgagcgagaaagactgcgaaaaaggctttattttggatggtttcccgcgtaccgtgcgccaagcggaatatctggatagttttcttgaaagccagggcaaacagttgacagccgccgtgctgattgaggtccccgaagatgaagttgttgcacgtctgctgtctcgccgtatctgtccgaaatgcgggcgtagttacaacatgatttttctgccaccaaaagaagacgagctgtgtgacgattgcggtgtcagcttagtacagcgtttagatgataaggaagaaacggtccgtcaccgcctgaaagtctaccgtgaggcgacccagccggtcattgactattatagtaagaaaggtattctcgcacgcgtagatgggtcgcaaggaatcccacctatcgtggcagaagtcctggggattctgggttggagcgataag

SEQ ID NO: 2040 - protein, 231 aa, synthetic construct
  REGION 1..231: note = variant of adenylate kinase from Thermotoga neapolitana
MHHHHHHGGSGMGAYLVLLGPPGAGKGTQGRIISAKTGIPHISTGDILRDIVAKQNDEVASSIKEIMLKGELVPDELGNAVVKRRLSEKDCEKGFILDGFPRTVRQAEYLDSFLESQGKQLTAAVLIEVPEDEVVARLLSRRICPKCGRSYNMIFLPPKEDELCDDCGVSLVQRLDDKEETVRHRLKVYREATQPVIDYYSKKGILARVDGSQGIPPIVAEVLGILGWSDK

SEQ ID NO: 2041 - DNA, 693 bp, synthetic construct
  misc_feature 1..693: note = variant of adenylate kinase from Thermotoga neapolitana
  source 1..693: mol_type = other DNA
atgcaccatcatcaccatcacgggggctccggcatgggggcatatctggtgttattaggtccgccgggcgcgggaaaaggtacccaaggccgtattatttcggcaaagactggcatcccgcatattagcacgggcgatatcctgcgtgacatcgtcgctaagcaaaacgatgaagttgcctcgagcattaaagagatcatgctgaaaggtgaactcgttccagatgaactgggtaatgcggtagtaaaacgccgcctgatggagaaagactgcgaaaaaggctttattttggatggtttcccgcgtaccgtgcgccaagcggaatatctggatagttttcttgaaagccagggcaaacagttgacagccgccgtgctgattgaggtccccgaagatgaagttgttgcacgtctgctgtctcgccgtatctgtccgaaatgcgggcgtagttacaacatgatttttctgccaccaaaagaagacgagctgtgtgacgattgcggtgtcagcttagtacagcgtttagatgataaggaagaaacggtccgtcaccgcctgaaagtctaccgtgagaagacccagccggtcattgactattatagtaagaaaggtattctcgcacgcgtagatgggtcgcaaggaatcccacctatcgtggcagaagtcctggggattctgggttggagcgataag

SEQ ID NO: 2042 - protein, 231 aa, synthetic construct
  REGION 1..231: note = variant of adenylate kinase from Thermotoga neapolitana
MHHHHHHGGSGMGAYLVLLGPPGAGKGTQGRIISAKTGIPHISTGDILRDIVAKQNDEVASSIKEIMLKGELVPDELGNAVVKRRLMEKDCEKGFILDGFPRTVRQAEYLDSFLESQGKQLTAAVLIEVPEDEVVARLLSRRICPKCGRSYNMIFLPPKEDELCDDCGVSLVQRLDDKEETVRHRLKVYREKTQPVIDYYSKKGILARVDGSQGIPPIVAEVLGILGWSDK

SEQ ID NO: 2043 - DNA, 693 bp, synthetic construct
  misc_feature 1..693: note = variant of adenylate kinase from Thermotoga neapolitana
  source 1..693: mol_type = other DNA
atgcaccatcatcaccatcacgggggctccggcatgggggcatatctggtgttattaggtccgccgggcgcgggaaaaggtacccaaggccgtattatttcggcaaagactggcatcccgcatattagcacgggcgatatcctgcgtgacatcgtcgctaagcaaaacgatgaagttgcctcgagcattaaagagatcatgctgaaaggtgaactcgttccagatgaactgggtaatgcggtagtaaaacgccgcctgtcggagaaagactgcgaaaaaggctttattttggatggtttcccgcgtaccgtgcgccaagcggaatatctggatagttttcttgaaagccagggccgccagttgacagccgccgtgctgattgaggtccccgaagatgaagttgttgcacgtctgctgtctcgccgtatctgtccgaaatgcgggcgtagttacaacatgatttttctgccaccaaaagaagacgagctgtgtgacgattgcggtgtcagcttagtacagcgtttagatgataaggaagaaacggtccgtcaccgcctgaaagtctaccgtgaggcgacccagccggtcattgactattatagtaagaaaggtattctcgcacgcgtagatgggtcgcaaggaatcccacctatcgtggcagaagtcctggggattctgggttggagcgataag

SEQ ID NO: 2044 - protein, 231 aa, synthetic construct
  REGION 1..231: note = variant of adenylate kinase from Thermotoga neapolitana
MHHHHHHGGSGMGAYLVLLGPPGAGKGTQGRIISAKTGIPHISTGDILRDIVAKQNDEVASSIKEIMLKGELVPDELGNAVVKRRLSEKDCEKGFILDGFPRTVRQAEYLDSFLESQGRQLTAAVLIEVPEDEVVARLLSRRICPKCGRSYNMIFLPPKEDELCDDCGVSLVQRLDDKEETVRHRLKVYREATQPVIDYYSKKGILARVDGSQGIPPIVAEVLGILGWSDK

SEQ ID NO: 2045 - DNA, 693 bp, synthetic construct
  misc_feature 1..693: note = variant of adenylate kinase from Thermotoga neapolitana
  source 1..693: mol_type = other DNA
atgcaccatcatcaccatcacgggggctccggcatgggggcatatctggtgttattaggtccgccgggcgcgggaaaaggtacccaaggccgtattatttcggcaaagactggcatcccgcatattagcacgggcgatatcctgcgtgacatcgtcgctaagcaaaacgatgaagttgcctcgagcattaaagagatcatgctgaaaggtgaactcgttccagatgaactgggtaatgcggtagtaaaacgccgcctgtcggagaaagactgcgaaaaaggctttattttggatggtttcccgcgtaccgtgcgccaagcggaatatctggatagttttcttgaaagccagggcaaacagttgacagccgccgtgctgattgaggtccccgaagatgaagttgttgcacgtctgctgtctcgccgtatctgtccgaaatgcgggcgtagttacaacatgatttttctgccaccaaaagaagacgagctgtgtgacgattgcggtgtcagcttagtacagcgtttagatgataaggaagaaacggtccgtcaccgcctgaaagtctaccgtgagaaaacccagccggtcattgactattatagtaagaaaggtattctcgcacgcgtagatgggtcgcaaggaatcccacctatcgtggcagaagtcctggggattctgggttggagcgataag

SEQ ID NO: 2046 - protein, 231 aa, synthetic construct
  REGION 1..231: note = variant of adenylate kinase from Thermotoga neapolitana
MHHHHHHGGSGMGAYLVLLGPPGAGKGTQGRIISAKTGIPHISTGDILRDIVAKQNDEVASSIKEIMLKGELVPDELGNAVVKRRLSEKDCEKGFILDGFPRTVRQAEYLDSFLESQGKQLTAAVLIEVPEDEVVARLLSRRICPKCGRSYNMIFLPPKEDELCDDCGVSLVQRLDDKEETVRHRLKVYREKTQPVIDYYSKKGILARVDGSQGIPPIVAEVLGILGWSDK

SEQ ID NO: 2047 - DNA, 693 bp, synthetic construct
  misc_feature 1..693: note = variant of adenylate kinase from Thermotoga neapolitana
  source 1..693: mol_type = other DNA
atgcaccatcatcaccatcacgggggctccggcatgggggcatatctggtgttattaggtccgccgggcgcgggaaaaggtacccaaggccgtattatttcggcaaagactggcatcccgcatattagcacgggcgatatcctgcgtgacatcgtcgctaagcaaaacgatgaagtggcctcgagcattaaagagatcatgctgaaaggtgaactcgttccagatgaactgggtaatgcggtagtaaaacgccgcctgtcggagaaagactgcgaaaaaggctttattttggatggtttcccgcgtaccgtgcgccaagcggaatatctggattcgtttcttgaaagccagggccgccagttgacagccgccgtgctgattgaggtccccgaagatgaagttgttgcacgtctgctgtctcgccgtatctgtccgaactgcgggcgtagttacaacatgatttttctgccaccaaaagaagacgagctgtgtgacgattgcggtgtcagcttagtacagcgtttagatgataaggaagaaacggtccgtcaccgcctgaaagtctaccgtgaggcgacccagccggtcattgactattatagtaagaaaggtattctcgcacgcgtagatgggtcgcaaggaatcccacctatcgtggcagaagtcctggggattctgggttggagcgataag

SEQ ID NO: 2048 - protein, 231 aa, synthetic construct
  REGION 1..231: note = variant of adenylate kinase from Thermotoga neapolitana
MHHHHHHGGSGMGAYLVLLGPPGAGKGTQGRIISAKTGIPHISTGDILRDIVAKQNDEVASSIKEIMLKGELVPDELGNAVVKRRLSEKDCEKGFILDGFPRTVRQAEYLDSFLESQGRQLTAAVLIEVPEDEVVARLLSRRICPNCGRSYNMIFLPPKEDELCDDCGVSLVQRLDDKEETVRHRLKVYREATQPVIDYYSKKGILARVDGSQGIPPIVAEVLGILGWSDK

SEQ ID NO: 2049 - DNA, 693 bp, synthetic construct
  misc_feature 1..693: note = variant of adenylate kinase from Thermotoga neapolitana
  source 1..693: mol_type = other DNA
atgcaccatcatcaccatcacgggggctccggcatgggggcatatctggtgttattaggtccgccgggcgcgggaaaaggtacccaaggccgtattatttcggcaaagactggcatcccgcatattagcacgggcgatatcctgcgtgacatcgtcgctaagcaaaacgatgaagttgcctcgagcattaaagagatcatgctgaaaggtgaactcgttccagatgaactgggtaatgcggtagtaaaacgccgcctggaagagaaagactgcgaaaaaggctttattttggatggtttcccgcgtaccgtgcgccaagcggaatatctggatagttttcttgaaagccagggccgccagttgacagccgccgtgctgattgaggtccccgaagatgaagttgttgcacgtctgctgtctcgccgtatctgtccgaaatgcgggcgtagttacaacatgatttttctgccaccaaaagaagacgagctgtgtgacgattgcggtgtcagcttagtacagcgtttagatgataaggaagaaacggtccgtcaccgcctgaaagtctaccgtgagaagacccagccggtcattgactattatagtaagaaaggtattctcgcacgcgtagatgggtcgcaaggaatcccacctatcgtggcagaagtcctggggattctgggttggagcgataag

SEQ ID NO: 2050 - protein, 231 aa, synthetic construct
  REGION 1..231: note = variant of adenylate kinase from Thermotoga neapolitana
MHHHHHHGGSGMGAYLVLLGPPGAGKGTQGRIISAKTGIPHISTGDILRDIVAKQNDEVASSIKEIMLKGELVPDELGNAVVKRRLEEKDCEKGFILDGFPRTVRQAEYLDSFLESQGRQLTAAVLIEVPEDEVVARLLSRRICPKCGRSYNMIFLPPKEDELCDDCGVSLVQRLDDKEETVRHRLKVYREKTQPVIDYYSKKGILARVDGSQGIPPIVAEVLGILGWSDK

SEQ ID NO: 2051 - DNA, 693 bp, synthetic construct
  misc_feature 1..693: note = variant of adenylate kinase from Thermotoga neapolitana
  source 1..693: mol_type = other DNA
atgcaccatcatcaccatcacgggggctccggcatgggggcatatctggtgttattaggtccgccgggcgcgggaaaaggtacccaaggccgtattatttcggcaaagactggcatcccgcatattagcacgggcgatatcctgcgtgacatcgtcgctaagcaaaacgatgaagttgcctcgagcattaaagagatcatgctgaaaggtgaactcgttccagatgaactgggtaatgcggtagtaaaacgccgcctgatggagaaagactgcgaaaaaggctttattttggatggtttcccgcgtaccgtgcgccaagcggaatatctggatagttttcttgaaagccagggccgccagttgacagccgccgtgctgattgaggtccccgaagatgaagttgttgcacgtctgctgtctcgccgtatctgtccgaaatgcgggcgtagttacaacatgatttttctgccaccaaaagaagacgagctgtgtgacgattgcggtgtcagcttagtacagcgtttagatgataaggaagaaacggtccgtcaccgcctgaaagtctaccgtgaggcgacccagccggtcattgactattatagtaagaaaggtattctcgcacgcgtagatgggtcgcaaggaatcccacctatcgtggcagaagtcctggggattctgggttggagcgataag

SEQ ID NO: 2052 - protein, 231 aa, synthetic construct
  REGION 1..231: note = variant of adenylate kinase from Thermotoga neapolitana
MHHHHHHGGSGMGAYLVLLGPPGAGKGTQGRIISAKTGIPHISTGDILRDIVAKQNDEVASSIKEIMLKGELVPDELGNAVVKRRLMEKDCEKGFILDGFPRTVRQAEYLDSFLESQGRQLTAAVLIEVPEDEVVARLLSRRICPKCGRSYNMIFLPPKEDELCDDCGVSLVQRLDDKEETVRHRLKVYREATQPVIDYYSKKGILARVDGSQGIPPIVAEVLGILGWSDK

SEQ ID NO: 2053 - DNA, 693 bp, synthetic construct
  misc_feature 1..693: note = variant of adenylate kinase from Thermotoga neapolitana
  source 1..693: mol_type = other DNA
atgcaccatcatcaccatcacgggggctccggcatgggggcatatctggtgttattaggtccgccgggcgcgggaaaaggtacccaaggccgtattatttcggcaaagactggcatcccgcatattagcacgggcgatatcctgcgtgacatcgtcgctaagcaaaacgatgaagtggcctcgagcattaaagagatcatgctgaaaggtgaactcgttccagatgaactgggtaatgcggtagtaaaacgccgcctgatggagaaagactgcgaaaaaggctttattttggatggtttcccgcgtaccgtgcgccaagcggaatatctggatagttttcttgaaagccagggccgccagttgacagccgccgtgctgattgaggtccccgaagatgaagttgttgcacgtctgctgtctcgccgtatctgtccgaaatgcgggcgtagttacaacatgatttttctgccaccaaaagaagacgagctgtgtgacgattgcggtgtcagcttagtacagcgtttagatgataaggaagaaacggtccgtcaccgcctgaaagtctaccgtgagaagacccagccggtcattgactattatagtaagaaaggtattctcgcacgcgtagatgggtcgcaaggaatcccacctatcgtggcagaagtcctggggattctgggttggagcgataag

SEQ ID NO: 2054 - protein, 231 aa, synthetic construct
  REGION 1..231: note = variant of adenylate kinase from Thermotoga neapolitana
MHHHHHHGGSGMGAYLVLLGPPGAGKGTQGRIISAKTGIPHISTGDILRDIVAKQNDEVASSIKEIMLKGELVPDELGNAVVKRRLMEKDCEKGFILDGFPRTVRQAEYLDSFLESQGRQLTAAVLIEVPEDEVVARLLSRRICPKCGRSYNMIFLPPKEDELCDDCGVSLVQRLDDKEETVRHRLKVYREKTQPVIDYYSKKGILARVDGSQGIPPIVAEVLGILGWSDK

SEQ ID NO: 2055 - DNA, 693 bp, synthetic construct
  misc_feature 1..693: note = variant of adenylate kinase from Thermotoga neapolitana
  source 1..693: mol_type = other DNA
atgcaccatcatcaccatcacgggggctccggcatgggggcatatctggtgttattaggtccgccgggcgcgggaaaaggtacccaaggccgtattatttcggcaaagactggcatcccgcatattagcacgggcgatatcctgcgtgacatcgtcgctaagcaaaacgatgaactggcctcgagcattaaagagatcatgctgaaaggtgaactcgttccagatgaactgggtaatgcggtagtaaaacgccgcctggaagagaaagactgcgaaaaaggctttattttggatggtttcccgcgtaccgtgcgccaagcggaatatctggatagttttcttgaaagccagggccgccagttgacagccgccgtgctgattgaggtccccgaagatgaagttgttgcacgtctgctgtctcgccgtatctgtccgaaatgcgggcgtagttacaacatgatttttctgccaccaaaagaagacgagctgtgtgacgattgcggtgtcagcttagtacagcgtttagatgataaggaagaaacggtccgtcaccgcctgaaagtctaccgtgagaaaacccagccggtcattgactattatagtaagaaaggtattctcgcacgcgtagatgggtcgcaaggaatcccacctatcgtggcagaagtcctggggattctgggttggagcgataag

SEQ ID NO: 2056 - protein, 231 aa, synthetic construct
  REGION 1..231: note = variant of adenylate kinase from Thermotoga neapolitana
MHHHHHHGGSGMGAYLVLLGPPGAGKGTQGRIISAKTGIPHISTGDILRDIVAKQNDELASSIKEIMLKGELVPDELGNAVVKRRLEEKDCEKGFILDGFPRTVRQAEYLDSFLESQGRQLTAAVLIEVPEDEVVARLLSRRICPKCGRSYNMIFLPPKEDELCDDCGVSLVQRLDDKEETVRHRLKVYREKTQPVIDYYSKKGILARVDGSQGIPPIVAEVLGILGWSDK

SEQ ID NO: 2057 - DNA, 693 bp, synthetic construct
  misc_feature 1..693: note = variant of adenylate kinase from Thermotoga neapolitana
  source 1..693: mol_type = other DNA
atgcaccatcatcaccatcacgggggctccggcatgggggcatatctggtgttattaggtccgccgggcgcgggaaaaggtacccaaggccgtattatttcggcaaagactggcatcccgcatattagcacgggcgatatcctgcgtgacatcgtcgctaagcaaaacgatgaactggcctcgagcattaaagagatcatgctgaaaggtgaactcgttccagatgaactgggtaatgcggtagtaaaacgccgcctggaagagaaagactgcgaaaaaggctttattttggatggtttcccgcgtaccgtgcgccaagcggaatatctggatgcgtttcttgaaagccagggccgccagttgacagccgccgtgctgattgaggtccccgaagatgaagttgttgcacgtctgctgtctcgccgtatctgtccgaactgcgggcgtagttacaacatgatttttctgccaccaaaagaagacgagctgtgtgacgattgcggtgtcagcttagtacagcgtttagatgataaggaagaaacggtccgtcaccgcctgaaagtctaccgtgagaaaacccagccggtcattgactattatagtaagaaaggtattctcgcacgcgtagatgggtcgcaaggaatcccacctatcgtggcagaagtcctggggattctgggttggagcgataag

SEQ ID NO: 2058 - protein, 231 aa, synthetic construct
  REGION 1..231: note = variant of adenylate kinase from Thermotoga neapolitana
MHHHHHHGGSGMGAYLVLLGPPGAGKGTQGRIISAKTGIPHISTGDILRDIVAKQNDELASSIKEIMLKGELVPDELGNAVVKRRLEEKDCEKGFILDGFPRTVRQAEYLDAFLESQGRQLTAAVLIEVPEDEVVARLLSRRICPNCGRSYNMIFLPPKEDELCDDCGVSLVQRLDDKEETVRHRLKVYREKTQPVIDYYSKKGILARVDGSQGIPPIVAEVLGILGWSDK

SEQ ID NO: 2059 - DNA, 693 bp, synthetic construct
  misc_feature 1..693: note = variant of adenylate kinase from Thermotoga neapolitana
  source 1..693: mol_type = other DNA
atgcaccatcatcaccatcacgggggctccggcatgggggcatatctggtgttattaggtccgccgggcgcgggaaaaggtacccaaggccgtattatttcggcaaagactggcatcccgcatattagcacgggcgatatcctgcgtgacatcgtcgctaagcaaaacgatgaagtggcctcgagcattaaagagatcatgctgaaaggtgaactcgttccagatgaactgggtaatgcggtagtaaaacgccgcctgtcggagaaagactgcgaaaaaggctttattttggatggtttcccgcgtaccgtgcgccaagcggaatatctggatagttttcttgaaagccagggccgccagttgacagccgccgtgctgattgaggtccccgaagatgaagttgttgcacgtctgctgtctcgccgtatctgtccgaactgcgggcgtagttacaacatgatttttctgccaccaaaagaagacgagctgtgtgacgattgcggtgtcagcttagtacagcgtttagatgataaggaagaaacggtccgtcaccgcctgaaagtctaccgtgagaagacccagccggtcattgactattatagtaagaaaggtattctcgcacgcgtagatgggtcgcaaggaatcccacctatcgtggcagaagtcctggggattctgggttggagcgataag

SEQ ID NO: 2060 - protein, 231 aa, synthetic construct
  REGION 1..231: note = variant of adenylate kinase from Thermotoga neapolitana
MHHHHHHGGSGMGAYLVLLGPPGAGKGTQGRIISAKTGIPHISTGDILRDIVAKQNDEVASSIKEIMLKGELVPDELGNAVVKRRLSEKDCEKGFILDGFPRTVRQAEYLDSFLESQGRQLTAAVLIEVPEDEVVARLLSRRICPNCGRSYNMIFLPPKEDELCDDCGVSLVQRLDDKEETVRHRLKVYREKTQPVIDYYSKKGILARVDGSQGIPPIVAEVLGILGWSDK

SEQ ID NO: 2061 - DNA, 693 bp, synthetic construct
  misc_feature 1..693: note = variant of adenylate kinase from Thermotoga neapolitana
  source 1..693: mol_type = other DNA
atgcaccatcatcaccatcacgggggctccggcatgggggcatatctggtgttattaggtccgccgggcgcgggaaaaggtacccaaggccgtattatttcggcaaagactggcatcccgcatattagcacgggcgatatcctgcgtgacatcgtcgctaagcaaaacgatgaagttgcctcgagcattaaagagatcatgctgaaaggtgaactcgttccagatgaactgggtaatgcggtagtaaaacgccgcctggaagagaaagactgcgaaaaaggctttattttggatggtttcccgcgtaccgtgcgccaagcggaatatctggatgcgtttcttgaaagccagggcaaacagttgacagccgccgtgctgattgaggtccccgaagatgaagttgttgcacgtctgctgtctcgccgtatctgtccgaaatgcgggcgtagttacaacatgatttttctgccaccaaaagaagacgagctgtgtgacgattgcggtgtcagcttagtacagcgtttagatgataaggaagaaacggtccgtcaccgcctgaaagtctaccgtgagaaaacccagccggtcattgactattatagtaagaaaggtattctcgcacgcgtagatgggtcgcaaggaatcccacctatcgtggcagaagtcctggggattctgggttggagcgataag

SEQ ID NO: 2062 - protein, 231 aa, synthetic construct
  REGION 1..231: note = variant of adenylate kinase from Thermotoga neapolitana
MHHHHHHGGSGMGAYLVLLGPPGAGKGTQGRIISAKTGIPHISTGDILRDIVAKQNDEVASSIKEIMLKGELVPDELGNAVVKRRLEEKDCEKGFILDGFPRTVRQAEYLDAFLESQGKQLTAAVLIEVPEDEVVARLLSRRICPKCGRSYNMIFLPPKEDELCDDCGVSLVQRLDDKEETVRHRLKVYREKTQPVIDYYSKKGILARVDGSQGIPPIVAEVLGILGWSDK

SEQ ID NO: 2063 - DNA, 693 bp, synthetic construct
  misc_feature 1..693: note = variant of adenylate kinase from Thermotoga neapolitana
  source 1..693: mol_type = other DNA
atgcaccatcatcaccatcacgggggctccggcatgggggcatatctggtgttattaggtccgccgggcgcgggaaaaggtacccaaggccgtattatttcggcaaagactggcatcccgcatattagcacgggcgatatcctgcgtgacatcgtcgctaagcaaaacgatgaagttgcctcgagcattaaagagatcatgctgaaaggtgaactcgttggggatgaactgggtaatgcggtagtaaaacgccgcctgtcggagaaagactgcgaaaaaggctttattttggatggtttcccgcgtaccgtgcgccaagcggaatatctggatagttttcttgaaagccagggccgccagttgacagccgccgtgctgattgaggtccccgaagatgaagttgttgcacgtctgctgtctcgccgtatctgtccgaaatgcgggcgtagttacaacatgatttttctgccaccaaaagaagacgagctgtgtgacgattgcggtgtcagcttagtacagcgtttagatgataaggaagaaacggtccgtcaccgcctgaaagtctaccgtgagaagacccagccggtcattgactattatagtaagaaaggtattctcgcacgcgtagatgggtcgcaaggaatcccacctatcgtggcagaagtcctggggattctgggttggagcgataag

SEQ ID NO: 2064 - protein, 231 aa, synthetic construct
  REGION 1..231: note = variant of adenylate kinase from Thermotoga neapolitana
MHHHHHHGGSGMGAYLVLLGPPGAGKGTQGRIISAKTGIPHISTGDILRDIVAKQNDEVASSIKEIMLKGELVGDELGNAVVKRRLSEKDCEKGFILDGFPRTVRQAEYLDSFLESQGRQLTAAVLIEVPEDEVVARLLSRRICPKCGRSYNMIFLPPKEDELCDDCGVSLVQRLDDKEETVRHRLKVYREKTQPVIDYYSKKGILARVDGSQGIPPIVAEVLGILGWSDK

SEQ ID NO: 2065 - DNA, 693 bp, synthetic construct
  misc_feature 1..693: note = variant of adenylate kinase from Thermotoga neapolitana
  source 1..693: mol_type = other DNA
atgcaccatcatcaccatcacgggggctccggcatgggggcatatctggtgttattaggtccgccgggcgcgggaaaaggtacccaaggccgtattatttcggcaaagactggcatcccgcatattagcacgggcgatatcctgcgtgacatcgtcgctaagcaaaacgatgaagttgcctcgagcattaaagagatcatgctgaaaggtgaactcgttccacttgaactgggtaatgcggtagtaaaacgccgcctgtcggagaaagactgcgaaaaaggctttattttggatggtttcccgcgtaccgtgcgccaagcggaatatctggatagttttcttgaaagccagggccgccagttgacagccgccgtgctgattgaggtccccgaagatgaagttgttgcacgtctgctgtctcgccgtatctgtccgaaatgcgggcgtagttacaacatgatttttctgccaccaaaagaagacgagctgtgtgacgattgcggtgtcagcttagtacagcgtttagatgataaggaagaaacggtccgtcaccgcctgaaagtctaccgtgagaagacccagccggtcattgactattatagtaagaaaggtattctcgcacgcgtagatgggtcgcaaggaatcccacctatcgtggcagaagtcctggggattctgggttggagcgataag

SEQ ID NO: 2066 - protein, 231 aa, synthetic construct
  REGION 1..231: note = variant of adenylate kinase from Thermotoga neapolitana
MHHHHHHGGSGMGAYLVLLGPPGAGKGTQGRIISAKTGIPHISTGDILRDIVAKQNDEVASSIKEIMLKGELVPLELGNAVVKRRLSEKDCEKGFILDGFPRTVRQAEYLDSFLESQGRQLTAAVLIEVPEDEVVARLLSRRICPKCGRSYNMIFLPPKEDELCDDCGVSLVQRLDDKEETVRHRLKVYREKTQPVIDYYSKKGILARVDGSQGIPPIVAEVLGILGWSDK

SEQ ID NO: 2067 - DNA, 693 bp, synthetic construct
  misc_feature 1..693: note = variant of adenylate kinase from Thermotoga neapolitana
  source 1..693: mol_type = other DNA
atgcaccatcatcaccatcacgggggctccggcatgggggcatatctggtgttattaggtccgccgggcgcgggaaaaggtacccaaggccgtattatttcggcaaagactggcatcccgcatattagcacgggcgatatcctgcgtgacatcgtcgctaagcaaaacgatgaagttgcctcgagcattaaagaggcgatgctgaaaggtgaactcgttccagatgaactgggtaatgcggtagtaaaacgccgcctgtcggagaaagactgcgaaaaaggctttattttggatggtttcccgcgtaccgtgcgccaagcggaatatctggatagttttcttgaaagccagggccgccagttgacagccgccgtgctgattgaggtccccgaagatgaagttgttgcacgtctgctgtctcgccgtatctgtccgaaatgcgggcgtagttacaacatgatttttctgccaccaaaagaagacgagctgtgtgacgattgcggtgtcagcttagtacagcgtttagatgataaggaagaaacggtccgtcaccgcctgaaagtctaccgtgagaagacccagccggtcattgactattatagtaagaaaggtattctcgcacgcgtagatgggtcgcaaggaatcccacctatcgtggcagaagtcctggggattctgggttggagcgataag

SEQ ID NO: 2068 - protein, 231 aa, synthetic construct
  REGION 1..231: note = variant of adenylate kinase from Thermotoga neapolitana
MHHHHHHGGSGMGAYLVLLGPPGAGKGTQGRIISAKTGIPHISTGDILRDIVAKQNDEVASSIKEAMLKGELVPDELGNAVVKRRLSEKDCEKGFILDGFPRTVRQAEYLDSFLESQGRQLTAAVLIEVPEDEVVARLLSRRICPKCGRSYNMIFLPPKEDELCDDCGVSLVQRLDDKEETVRHRLKVYREKTQPVIDYYSKKGILARVDGSQGIPPIVAEVLGILGWSDK

SEQ ID NO: 2069 - DNA, 693 bp, synthetic construct
  misc_feature 1..693: note = variant of adenylate kinase from Thermotoga neapolitana
  source 1..693: mol_type = other DNA
atgcaccatcatcaccatcacgggggctccggcatgggggcatatctggtgttattaggtccgccgggcgcgggaaaaggtacccaaggccgtattatttcggcaaagactggcatcccgcatattagcacgggcgatatcctgcgtgacatcgtcgctaagcaaaacgatgaagttgcctcgagcattaaagagatcatgctgaaaggtgaactcgttccagatgaactgggtaatgcggtagtaaaacgccgcctgtcggagaaagactgcgaaaaaggctttattttggatggtttcccgcgtaccgtgcgccaagcggaatatctggatagttttcttgaaagccagggccgccagttgacagccgccgtgctgattgaggtccccgaagatgaagttgttgcacgtctgctgtctcgccgtatctgtccgaaatgcgggcgtagttacaacatgatttttctgccaccaaaagaagacgagctgtgtgacgattgcggtgtcagcttagtacagcgtttagatgataaggaagaagtggtccgtcaccgcctgaaagtctaccgtgagaagacccagccggtcattgactattatagtaagaaaggtattctcgcacgcgtagatgggtcgcaaggaatcccacctatcgtggcagaagtcctggggattctgggttggagcgataag

SEQ ID NO: 2070 - protein, 231 aa, synthetic construct
  REGION 1..231: note = variant of adenylate kinase from Thermotoga neapolitana
MHHHHHHGGSGMGAYLVLLGPPGAGKGTQGRIISAKTGIPHISTGDILRDIVAKQNDEVASSIKEIMLKGELVPDELGNAVVKRRLSEKDCEKGFILDGFPRTVRQAEYLDSFLESQGRQLTAAVLIEVPEDEVVARLLSRRICPKCGRSYNMIFLPPKEDELCDDCGVSLVQRLDDKEEVVRHRLKVYREKTQPVIDYYSKKGILARVDGSQGIPPIVAEVLGILGWSDK

SEQ ID NO: 2071 - DNA, 693 bp, synthetic construct
  misc_feature 1..693: note = variant of adenylate kinase from Thermotoga neapolitana
  source 1..693: mol_type = other DNA
atgcaccatcatcaccatcacgggggctccggcatgggggcatatctggtgttattaggtccgccgggcgcgggaaaaggtacccaaggccgtattatttcggcaaagactggcatcccgcatattagcacgggcgatatcctgcgtgacatcgtcgctaagcaaaacgatgaagttgcctcgagcattaaagagtggatgctgaaaggtgaactcgttccagatgaactgggtaatgcggtagtaaaacgccgcctgtcggagaaagactgcgaaaaaggctttattttggatggtttcccgcgtaccgtgcgccaagcggaatatctggatagttttcttgaaagccagggccgccagttgacagccgccgtgctgattgaggtccccgaagatgaagttgttgcacgtctgctgtctcgccgtatctgtccgaaatgcgggcgtagttacaacatgatttttctgccaccaaaagaagacgagctgtgtgacgattgcggtgtcagcttagtacagcgtttagatgataaggaagaaacggtccgtcaccgcctgaaagtctaccgtgagaagacccagccggtcattgactattatagtaagaaaggtattctcgcacgcgtagatgggtcgcaaggaatcccacctatcgtggcagaagtcctggggattctgggttggagcgataag

SEQ ID NO: 2072 - protein, 231 aa, synthetic construct
  REGION 1..231: note = variant of adenylate kinase from Thermotoga neapolitana
MHHHHHHGGSGMGAYLVLLGPPGAGKGTQGRIISAKTGIPHISTGDILRDIVAKQNDEVASSIKEWMLKGELVPDELGNAVVKRRLSEKDCEKGFILDGFPRTVRQAEYLDSFLESQGRQLTAAVLIEVPEDEVVARLLSRRICPKCGRSYNMIFLPPKEDELCDDCGVSLVQRLDDKEETVRHRLKVYREKTQPVIDYYSKKGILARVDGSQGIPPIVAEVLGILGWSDK

SEQ ID NO: 2073 - DNA, 693 bp, synthetic construct
  misc_feature 1..693: note = variant of adenylate kinase from Thermotoga neapolitana
  source 1..693: mol_type = other DNA
atgcaccatcatcaccatcacgggggctccggcatgggggcatatctggtgttattaggtccgccgggcgcgggaaaaggtacccaaggccgtattatttcggcaaagactggcatcccgcatattagcacgggcgatatcctgcgtgacatcgtcgctaagcaaaacgatgaagttgcctcgagcattaaagagggtatgctgaaaggtgaactcgttccagatgaactgggtaatgcggtagtaaaacgccgcctgtcggagaaagactgcgaaaaaggctttattttggatggtttcccgcgtaccgtgcgccaagcggaatatctggatagttttcttgaaagccagggccgccagttgacagccgccgtgctgattgaggtccccgaagatgaagttgttgcacgtctgctgtctcgccgtatctgtccgaaatgcgggcgtagttacaacatgatttttctgccaccaaaagaagacgagctgtgtgacgattgcggtgtcagcttagtacagcgtttagatgataaggaagaaacggtccgtcaccgcctgaaagtctaccgtgagaagacccagccggtcattgactattatagtaagaaaggtattctcgcacgcgtagatgggtcgcaaggaatcccacctatcgtggcagaagtcctggggattctgggttggagcgataag

SEQ ID NO: 2074 - protein, 231 aa, synthetic construct
  REGION 1..231: note = variant of adenylate kinase from Thermotoga neapolitana
MHHHHHHGGSGMGAYLVLLGPPGAGKGTQGRIISAKTGIPHISTGDILRDIVAKQNDEVASSIKEGMLKGELVPDELGNAVVKRRLSEKDCEKGFILDGFPRTVRQAEYLDSFLESQGRQLTAAVLIEVPEDEVVARLLSRRICPKCGRSYNMIFLPPKEDELCDDCGVSLVQRLDDKEETVRHRLKVYREKTQPVIDYYSKKGILARVDGSQGIPPIVAEVLGILGWSDK

SEQ ID NO: 2075 - DNA, 693 bp, synthetic construct
  misc_feature 1..693: note = variant of adenylate kinase from Thermotoga neapolitana
  source 1..693: mol_type = other DNA
atgcaccatcatcaccatcacgggggctccggcatgggggcatatctggtgttattaggtccgccgggcgcgggaaaaggtacccaaggccgtattatttcggcaaagactggcatcccgcatattagcacgggcgatatcctgcgtgacatcgtcgctaagcaaaacgatgaagttgcctcgagcattaaagagcagatgctgaaaggtgaactcgttccagatgaactgggtaatgcggtagtaaaacgccgcctgtcggagaaagactgcgaaaaaggctttattttggatggtttcccgcgtaccgtgcgccaagcggaatatctggatagttttcttgaaagccagggccgccagttgacagccgccgtgctgattgaggtccccgaagatgaagttgttgcacgtctgctgtctcgccgtatctgtccgaaatgcgggcgtagttacaacatgatttttctgccaccaaaagaagacgagctgtgtgacgattgcggtgtcagcttagtacagcgtttagatgataaggaagaaacggtccgtcaccgcctgaaagtctaccgtgagaagacccagccggtcattgactattatagtaagaaaggtattctcgcacgcgtagatgggtcgcaaggaatcccacctatcgtggcagaagtcctggggattctgggttggagcgataag

SEQ ID NO: 2076 - protein, 231 aa, synthetic construct
  REGION 1..231: note = variant of adenylate kinase from Thermotoga neapolitana
MHHHHHHGGSGMGAYLVLLGPPGAGKGTQGRIISAKTGIPHISTGDILRDIVAKQNDEVASSIKEQMLKGELVPDELGNAVVKRRLSEKDCEKGFILDGFPRTVRQAEYLDSFLESQGRQLTAAVLIEVPEDEVVARLLSRRICPKCGRSYNMIFLPPKEDELCDDCGVSLVQRLDDKEETVRHRLKVYREKTQPVIDYYSKKGILARVDGSQGIPPIVAEVLGILGWSDK

SEQ ID NO: 2077 - DNA, 693 bp, synthetic construct
  misc_feature 1..693: note = variant of adenylate kinase from Thermotoga neapolitana
  source 1..693: mol_type = other DNA
atgcaccatcatcaccatcacgggggctccggcatgggggcatatctggtgttattaggtccgccgggcgcgggaaaaggtacccaaggccgtattatttcggcaaagactggcatcccgcatattagcacgggcgatatcctgcgtgacatcgtcgctaagcaaaacgatgaagttgcctcgagcattaaagagatcatgctgaaaggtgaactcgttccagatgaactgggtaatgcgtttgtaaaacgccgcctgtcggagaaagactgcgaaaaaggctttattttggatggtttcccgcgtaccgtgcgccaagcggaatatctggatagttttcttgaaagccagggccgccagttgacagccgccgtgctgattgaggtccccgaagatgaagttgttgcacgtctgctgtctcgccgtatctgtccgaaatgcgggcgtagttacaacatgatttttctgccaccaaaagaagacgagctgtgtgacgattgcggtgtcagcttagtacagcgtttagatgataaggaagaaacggtccgtcaccgcctgaaagtctaccgtgagaagacccagccggtcattgactattatagtaagaaaggtattctcgcacgcgtagatgggtcgcaaggaatcccacctatcgtggcagaagtcctggggattctgggttggagcgataag

SEQ ID NO: 2078 - protein, 231 aa, synthetic construct
  REGION 1..231: note = variant of adenylate kinase from Thermotoga neapolitana
MHHHHHHGGSGMGAYLVLLGPPGAGKGTQGRIISAKTGIPHISTGDILRDIVAKQNDEVASSIKEIMLKGELVPDELGNAFVKRRLSEKDCEKGFILDGFPRTVRQAEYLDSFLESQGRQLTAAVLIEVPEDEVVARLLSRRICPKCGRSYNMIFLPPKEDELCDDCGVSLVQRLDDKEETVRHRLKVYREKTQPVIDYYSKKGILARVDGSQGIPPIVAEVLGILGWSDK

SEQ ID NO: 2079 - DNA, 693 bp, synthetic construct
  misc_feature 1..693: note = variant of adenylate kinase from Thermotoga neapolitana
  source 1..693: mol_type = other DNA
atgcaccatcatcaccatcacgggggctccggcatgggggcatatctggtgttattaggtccgccgggcgcgggaaaaggtacccaaggccgtattatttcggcaaagactggcatcccgcatattagcacgggcgatatcctgcgtgacatcgtcgctaagcaaaacgatgaagttgcctcgagcattaaagagcatatgctgaaaggtgaactcgttccagatgaactgggtaatgcggtagtaaaacgccgcctgtcggagaaagactgcgaaaaaggctttattttggatggtttcccgcgtaccgtgcgccaagcggaatatctggatagttttcttgaaagccagggccgccagttgacagccgccgtgctgattgaggtccccgaagatgaagttgttgcacgtctgctgtctcgccgtatctgtccgaaatgcgggcgtagttacaacatgatttttctgccaccaaaagaagacgagctgtgtgacgattgcggtgtcagcttagtacagcgtttagatgataaggaagaaacggtccgtcaccgcctgaaagtctaccgtgagaagacccagccggtcattgactattatagtaagaaaggtattctcgcacgcgtagatgggtcgcaaggaatcccacctatcgtggcagaagtcctggggattctgggttggagcgataag

SEQ ID NO: 2080 - protein, 231 aa, synthetic construct
  REGION 1..231: note = variant of adenylate kinase from Thermotoga neapolitana
MHHHHHHGGSGMGAYLVLLGPPGAGKGTQGRIISAKTGIPHISTGDILRDIVAKQNDEVASSIKEHMLKGELVPDELGNAVVKRRLSEKDCEKGFILDGFPRTVRQAEYLDSFLESQGRQLTAAVLIEVPEDEVVARLLSRRICPKCGRSYNMIFLPPKEDELCDDCGVSLVQRLDDKEETVRHRLKVYREKTQPVIDYYSKKGILARVDGSQGIPPIVAEVLGILGWSDK

SEQ ID NO: 2081 - DNA, 693 bp, synthetic construct
  misc_feature 1..693: note = variant of adenylate kinase from Thermotoga neapolitana
  source 1..693: mol_type = other DNA
atgcaccatcatcaccatcacgggggctccggcatgggggcatatctggtgttattaggtccgccgggcgcgggaaaaggtacccaaggccgtattatttcggcaaagactggcatcccgcatattagcacgggcgatatcctgcgtgacatcgtcgctaagcaaaacgatgaagttgcctcgagcattaaagagatcatgctgaaaggtgaactccggccagatgaactgggtaatgcggtagtaaaacgccgcctgtcggagaaagactgcgaaaaaggctttattttggatggtttcccgcgtaccgtgcgccaagcggaatatctggatagttttcttgaaagccagggccgccagttgacagccgccgtgctgattgaggtccccgaagatgaagttgttgcacgtctgctgtctcgccgtatctgtccgaaatgcgggcgtagttacaacatgatttttctgccaccaaaagaagacgagctgtgtgacgattgcggtgtcagcttagtacagcgtttagatgataaggaagaaacggtccgtcaccgcctgaaagtctaccgtgagaagacccagccggtcattgactattatagtaagaaaggtattctcgcacgcgtagatgggtcgcaaggaatcccacctatcgtggcagaagtcctggggattctgggttggagcgataag

SEQ ID NO: 2082 - protein, 231 aa, synthetic construct
  REGION 1..231: note = variant of adenylate kinase from Thermotoga neapolitana
MHHHHHHGGSGMGAYLVLLGPPGAGKGTQGRIISAKTGIPHISTGDILRDIVAKQNDEVASSIKEIMLKGELRPDELGNAVVKRRLSEKDCEKGFILDGFPRTVRQAEYLDSFLESQGRQLTAAVLIEVPEDEVVARLLSRRICPKCGRSYNMIFLPPKEDELCDDCGVSLVQRLDDKEETVRHRLKVYREKTQPVIDYYSKKGILARVDGSQGIPPIVAEVLGILGWSDK

SEQ ID NO: 2083 - DNA, 693 bp, synthetic construct
  misc_feature 1..693: note = variant of adenylate kinase from Thermotoga neapolitana
  source 1..693: mol_type = other DNA
atgcaccatcatcaccatcacgggggctccggcatgggggcatatctggtgttattaggtccgccgggcgcgggaaaaggtacccaaggccgtattatttcggcaaagactggcatcccgcatattagcacgggcgatatcctgcgtgacatcgtcgctaagcaaaacgatgaagttgcctcgagcattaaagagaatatgctgaaaggtgaactcgttccagatgaactgggtaatgcggtagtaaaacgccgcctgtcggagaaagactgcgaaaaaggctttattttggatggtttcccgcgtaccgtgcgccaagcggaatatctggatagttttcttgaaagccagggccgccagttgacagccgccgtgctgattgaggtccccgaagatgaagttgttgcacgtctgctgtctcgccgtatctgtccgaaatgcgggcgtagttacaacatgatttttctgccaccaaaagaagacgagctgtgtgacgattgcggtgtcagcttagtacagcgtttagatgataaggaagaaacggtccgtcaccgcctgaaagtctaccgtgagaagacccagccggtcattgactattatagtaagaaaggtattctcgcacgcgtagatgggtcgcaaggaatcccacctatcgtggcagaagtcctggggattctgggttggagcgataag

SEQ ID NO: 2084 - protein, 231 aa, synthetic construct
  REGION 1..231: note = variant of adenylate kinase from Thermotoga neapolitana
MHHHHHHGGSGMGAYLVLLGPPGAGKGTQGRIISAKTGIPHISTGDILRDIVAKQNDEVASSIKENMLKGELVPDELGNAVVKRRLSEKDCEKGFILDGFPRTVRQAEYLDSFLESQGRQLTAAVLIEVPEDEVVARLLSRRICPKCGRSYNMIFLPPKEDELCDDCGVSLVQRLDDKEETVRHRLKVYREKTQPVIDYYSKKGILARVDGSQGIPPIVAEVLGILGWSDK

SEQ ID NO: 2085 - DNA, 693 bp, synthetic construct
  misc_feature 1..693: note = variant of adenylate kinase from Thermotoga neapolitana
  source 1..693: mol_type = other DNA
atgcaccatcatcaccatcacgggggctccggcatgggggcatatctggtgttattaggtccgccgggcgcgggaaaaggtacccaaggccgtattatttcggcaaagactggcatcccgcatattagcacgggcgatatcctgcgtgacatcgtcgctaagcaaaacgatgaagttgcctcgagcattaaagagatcatgctgaaaggtgaactcgttccagatgaaagtggtaatgcggtagtaaaacgccgcctgtcggagaaagactgcgaaaaaggctttattttggatggtttcccgcgtaccgtgcgccaagcggaatatctggatagttttcttgaaagccagggccgccagttgacagccgccgtgctgattgaggtccccgaagatgaagttgttgcacgtctgctgtctcgccgtatctgtccgaaatgcgggcgtagttacaacatgatttttctgccaccaaaagaagacgagctgtgtgacgattgcggtgtcagcttagtacagcgtttagatgataaggaagaaacggtccgtcaccgcctgaaagtctaccgtgagaagacccagccggtcattgactattatagtaagaaaggtattctcgcacgcgtagatgggtcgcaaggaatcccacctatcgtggcagaagtcctggggattctgggttggagcgataag

SEQ ID NO: 2086 - protein, 231 aa, synthetic construct
  REGION 1..231: note = variant of adenylate kinase from Thermotoga neapolitana
MHHHHHHGGSGMGAYLVLLGPPGAGKGTQGRIISAKTGIPHISTGDILRDIVAKQNDEVASSIKEIMLKGELVPDESGNAVVKRRLSEKDCEKGFILDGFPRTVRQAEYLDSFLESQGRQLTAAVLIEVPEDEVVARLLSRRICPKCGRSYNMIFLPPKEDELCDDCGVSLVQRLDDKEETVRHRLKVYREKTQPVIDYYSKKGILARVDGSQGIPPIVAEVLGILGWSDK

SEQ ID NO: 2087 - DNA, 693 bp, synthetic construct
  misc_feature 1..693: note = variant of adenylate kinase from Thermotoga neapolitana
  source 1..693: mol_type = other DNA
atgcaccatcatcaccatcacgggggctccggcatgggggcatatctggtgttattaggtccgccgggcgcgggaaaaggtacccaaggccgtattatttcggcaaagactggcatcccgcatattagcacgggcgatatcctgcgtgacatcgtcgctaagcaaaacgatgaagttgcctcgagcattaaagagatcatgctgaaaggtgaactcgttccagatgaagcgggtaatgcggtagtaaaacgccgcctgtcggagaaagactgcgaaaaaggctttattttggatggtttcccgcgtaccgtgcgccaagcggaatatctggatagttttcttgaaagccagggccgccagttgacagccgccgtgctgattgaggtccccgaagatgaagttgttgcacgtctgctgtctcgccgtatctgtccgaaatgcgggcgtagttacaacatgatttttctgccaccaaaagaagacgagctgtgtgacgattgcggtgtcagcttagtacagcgtttagatgataaggaagaaacggtccgtcaccgcctgaaagtctaccgtgagaagacccagccggtcattgactattatagtaagaaaggtattctcgcacgcgtagatgggtcgcaaggaatcccacctatcgtggcagaagtcctggggattctgggttggagcgataag

SEQ ID NO: 2088 - protein, 231 aa, synthetic construct
  REGION 1..231: note = variant of adenylate kinase from Thermotoga neapolitana
MHHHHHHGGSGMGAYLVLLGPPGAGKGTQGRIISAKTGIPHISTGDILRDIVAKQNDEVASSIKEIMLKGELVPDEAGNAVVKRRLSEKDCEKGFILDGFPRTVRQAEYLDSFLESQGRQLTAAVLIEVPEDEVVARLLSRRICPKCGRSYNMIFLPPKEDELCDDCGVSLVQRLDDKEETVRHRLKVYREKTQPVIDYYSKKGILARVDGSQGIPPIVAEVLGILGWSDK

SEQ ID NO: 2089 - DNA, 693 bp, synthetic construct
  misc_feature 1..693: note = variant of adenylate kinase from Thermotoga neapolitana
  source 1..693: mol_type = other DNA
atgcaccatcatcaccatcacgggggctccggcatgggggcatatctggtgttattaggtccgccgggcgcgggaaaaggtacccaaggccgtattatttcggcaaagactggcatcccgcatattagcacgggcgatatcctgcgtgacatcgtcgctaagcaaaacgatgaagttgcctcgagcattaaagaggatatgctgaaaggtgaactcgttccagatgaactgggtaatgcggtagtaaaacgccgcctgtcggagaaagactgcgaaaaaggctttattttggatggtttcccgcgtaccgtgcgccaagcggaatatctggatagttttcttgaaagccagggccgccagttgacagccgccgtgctgattgaggtccccgaagatgaagttgttgcacgtctgctgtctcgccgtatctgtccgaaatgcgggcgtagttacaacatgatttttctgccaccaaaagaagacgagctgtgtgacgattgcggtgtcagcttagtacagcgtttagatgataaggaagaaacggtccgtcaccgcctgaaagtctaccgtgagaagacccagccggtcattgactattatagtaagaaaggtattctcgcacgcgtagatgggtcgcaaggaatcccacctatcgtggcagaagtcctggggattctgggttggagcgataag

SEQ ID NO: 2090 - protein, 231 aa, synthetic construct
  REGION 1..231: note = variant of adenylate kinase from Thermotoga neapolitana
MHHHHHHGGSGMGAYLVLLGPPGAGKGTQGRIISAKTGIPHISTGDILRDIVAKQNDEVASSIKEDMLKGELVPDELGNAVVKRRLSEKDCEKGFILDGFPRTVRQAEYLDSFLESQGRQLTAAVLIEVPEDEVVARLLSRRICPKCGRSYNMIFLPPKEDELCDDCGVSLVQRLDDKEETVRHRLKVYREKTQPVIDYYSKKGILARVDGSQGIPPIVAEVLGILGWSDK

SEQ ID NO: 2091 - DNA, 693 bp, synthetic construct
  misc_feature 1..693: note = variant of adenylate kinase from Thermotoga neapolitana
  source 1..693: mol_type = other DNA
atgcaccatcatcaccatcacgggggctccggcatgggggcatatctggtgttattaggtccgccgggcgcgggaaaaggtacccaaggccgtattatttcggcaaagactggcatcccgcatattagcacgggcgatatcctgcgtgacatcgtcgctaagcaaaacgatgaagttgcctcgagcattaaagaggttatgctgaaaggtgaactcgttccagatgaactgggtaatgcggtagtaaaacgccgcctgtcggagaaagactgcgaaaaaggctttattttggatggtttcccgcgtaccgtgcgccaagcggaatatctggatagttttcttgaaagccagggccgccagttgacagccgccgtgctgattgaggtccccgaagatgaagttgttgcacgtctgctgtctcgccgtatctgtccgaaatgcgggcgtagttacaacatgatttttctgccaccaaaagaagacgagctgtgtgacgattgcggtgtcagcttagtacagcgtttagatgataaggaagaaacggtccgtcaccgcctgaaagtctaccgtgagaagacccagccggtcattgactattatagtaagaaaggtattctcgcacgcgtagatgggtcgcaaggaatcccacctatcgtggcagaagtcctggggattctgggttggagcgataag

SEQ ID NO: 2092 - protein, 231 aa, synthetic construct
  REGION 1..231: note = variant of adenylate kinase from Thermotoga neapolitana
MHHHHHHGGSGMGAYLVLLGPPGAGKGTQGRIISAKTGIPHISTGDILRDIVAKQNDEVASSIKEVMLKGELVPDELGNAVVKRRLSEKDCEKGFILDGFPRTVRQAEYLDSFLESQGRQLTAAVLIEVPEDEVVARLLSRRICPKCGRSYNMIFLPPKEDELCDDCGVSLVQRLDDKEETVRHRLKVYREKTQPVIDYYSKKGILARVDGSQGIPPIVAEVLGILGWSDK

SEQ ID NO: 2093 - DNA, 693 bp, synthetic construct
  misc_feature 1..693: note = variant of adenylate kinase from Thermotoga neapolitana
  source 1..693: mol_type = other DNA
atgcaccatcatcaccatcacgggggctccggcatgggggcatatctggtgttattaggtccgccgggcgcgggaaaaggtacccaaggccgtattatttcggcaaagactggcatcccgcatattagcacgggcgatatcctgcgtgacatcgtcgctaagcaaaacgatgaagttgcctcgagcattaaagagatcatgctgaaaggtgaactcgttccagatgaactgggtaatgcggtagtaaaacgccgcctgtcggagaaagactgcgaaaaaggctttattttggatggtttcccgcgtaccgtgcgccaagcggaatatctggatagttttcttgaaagccagggccgccagttgacagccgccgtgctgattgaggtccccgaagatgaagttgttgcacgtctgctgtctcgccgtatctgtccgaaatgcgggcgtagttacaacatgatttttctgccaccaaaagaagacgagctgtgtgacgattgcggtgtcagcttagtacagcgtttagatgataaggaagaaacggtccgtcaccgcctgaaactgtaccgtgagaagacccagccggtcattgactattatagtaagaaaggtattctcgcacgcgtagatgggtcgcaaggaatcccacctatcgtggcagaagtcctggggattctgggttggagcgataag

SEQ ID NO: 2094 - protein, 231 aa, synthetic construct
  REGION 1..231: note = variant of adenylate kinase from Thermotoga neapolitana
MHHHHHHGGSGMGAYLVLLGPPGAGKGTQGRIISAKTGIPHISTGDILRDIVAKQNDEVASSIKEIMLKGELVPDELGNAVVKRRLSEKDCEKGFILDGFPRTVRQAEYLDSFLESQGRQLTAAVLIEVPEDEVVARLLSRRICPKCGRSYNMIFLPPKEDELCDDCGVSLVQRLDDKEETVRHRLKLYREKTQPVIDYYSKKGILARVDGSQGIPPIVAEVLGILGWSDK

SEQ ID NO: 2095 - DNA, 693 bp, synthetic construct
  misc_feature 1..693: note = variant of adenylate kinase from Thermotoga neapolitana
  source 1..693: mol_type = other DNA
atgcaccatcatcaccatcacgggggctccggcatgggggcatatctggtgttattaggtccgccgggcgcgggaaaaggtacccaaggccgtattatttcggcaaagactggcatcccgcatattagcacgggcgatatcctgcgtgacatcgtcgctaagcaaaacgatgaagttgcctcgagcattaaagagatcatgctgaaaggtgaactcgttccagatgaacagggtaatgcggtagtaaaacgccgcctgtcggagaaagactgcgaaaaaggctttattttggatggtttcccgcgtaccgtgcgccaagcggaatatctggatagttttcttgaaagccagggccgccagttgacagccgccgtgctgattgaggtccccgaagatgaagttgttgcacgtctgctgtctcgccgtatctgtccgaaatgcgggcgtagttacaacatgatttttctgccaccaaaagaagacgagctgtgtgacgattgcggtgtcagcttagtacagcgtttagatgataaggaagaaacggtccgtcaccgcctgaaagtctaccgtgagaagacccagccggtcattgactattatagtaagaaaggtattctcgcacgcgtagatgggtcgcaaggaatcccacctatcgtggcagaagtcctggggattctgggttggagcgataag

SEQ ID NO: 2096 - protein, 231 aa, synthetic construct
  REGION 1..231: note = variant of adenylate kinase from Thermotoga neapolitana
MHHHHHHGGSGMGAYLVLLGPPGAGKGTQGRIISAKTGIPHISTGDILRDIVAKQNDEVASSIKEIMLKGELVPDEQGNAVVKRRLSEKDCEKGFILDGFPRTVRQAEYLDSFLESQGRQLTAAVLIEVPEDEVVARLLSRRICPKCGRSYNMIFLPPKEDELCDDCGVSLVQRLDDKEETVRHRLKVYREKTQPVIDYYSKKGILARVDGSQGIPPIVAEVLGILGWSDK

SEQ ID NO: 2097 - DNA, 693 bp, synthetic construct
  misc_feature 1..693: note = variant of adenylate kinase from Thermotoga neapolitana
  source 1..693: mol_type = other DNA
atgcaccatcatcaccatcacgggggctccggcatgggggcatatctggtgttattaggtccgccgggcgcgggaaaaggtacccaaggccgtattatttcggcaaagactggcatcccgcatattagcacgggcgatatcctgcgtgacatcgtcgctaagcaaaacgatgaagttgcctcgagcattaaagagatcatgctgaaaggtgaactcattccagatgaactgggtaatgcggtagtaaaacgccgcctgtcggagaaagactgcgaaaaaggctttattttggatggtttcccgcgtaccgtgcgccaagcggaatatctggatagttttcttgaaagccagggccgccagttgacagccgccgtgctgattgaggtccccgaagatgaagttgttgcacgtctgctgtctcgccgtatctgtccgaaatgcgggcgtagttacaacatgatttttctgccaccaaaagaagacgagctgtgtgacgattgcggtgtcagcttagtacagcgtttagatgataaggaagaaacggtccgtcaccgcctgaaagtctaccgtgagaagacccagccggtcattgactattatagtaagaaaggtattctcgcacgcgtagatgggtcgcaaggaatcccacctatcgtggcagaagtcctggggattctgggttggagcgataag

SEQ ID NO: 2098 - protein, 231 aa, synthetic construct
  REGION 1..231: note = variant of adenylate kinase from Thermotoga neapolitana
MHHHHHHGGSGMGAYLVLLGPPGAGKGTQGRIISAKTGIPHISTGDILRDIVAKQNDEVASSIKEIMLKGELIPDELGNAVVKRRLSEKDCEKGFILDGFPRTVRQAEYLDSFLESQGRQLTAAVLIEVPEDEVVARLLSRRICPKCGRSYNMIFLPPKEDELCDDCGVSLVQRLDDKEETVRHRLKVYREKTQPVIDYYSKKGILARVDGSQGIPPIVAEVLGILGWSDK

SEQ ID NO: 2099 - DNA, 693 bp, synthetic construct
  misc_feature 1..693: note = variant of adenylate kinase from Thermotoga neapolitana
  source 1..693: mol_type = other DNA
atgcaccatcatcaccatcacgggggctccggcatgggggcatatctggtgttattaggtccgccgggcgcgggaaaaggtacccaaggccgtattatttcggcaaagactggcatcccgcatattagcacgggcgatatcctgcgtgacatcgtcgctaagcaaaacgatgaagttgcctcgagcattaaagagatcatgctgaaaggtgaactcgttccagatgaactgggtaatgcggtagtaaaacgccgcctgtcggagaaagactgcgaaaaaggctttattttggatggtttcccgcgtaccgtgcgccaagcggaatatctggatagttttcttgaaagccagggccgccagttgacagccgccgtgctgattgaggtccccgaagatgaagttgttgcacgtctgctgtctcgccgtatctgtccgaaatgcgggcgtagttacaacatgatttttctgccaccaaaagaagacgagctgtgtgacgattgcggtgtcagcttagtacagcgtttagatgataaggaagaaacggtccgtcaccgcctgaaagtctaccgtgagaagacccagccggtcattgactattatagtaagaaaggtattctcgcacgcgtagatgggtcgcaaggaatcgagcctatcgtggcagaagtcctggggattctgggttggagcgataag

SEQ ID NO: 2100 - protein, 231 aa, synthetic construct
  REGION 1..231: note = variant of adenylate kinase from Thermotoga neapolitana
MHHHHHHGGSGMGAYLVLLGPPGAGKGTQGRIISAKTGIPHISTGDILRDIVAKQNDEVASSIKEIMLKGELVPDELGNAVVKRRLSEKDCEKGFILDGFPRTVRQAEYLDSFLESQGRQLTAAVLIEVPEDEVVARLLSRRICPKCGRSYNMIFLPPKEDELCDDCGVSLVQRLDDKEETVRHRLKVYREKTQPVIDYYSKKGILARVDGSQGIEPIVAEVLGILGWSDK

SEQ ID NO: 2101 - DNA, 693 bp, synthetic construct
  misc_feature 1..693: note = variant of adenylate kinase from Thermotoga neapolitana
  source 1..693: mol_type = other DNA
atgcaccatcatcaccatcacgggggctccggcatgggggcatatctggtgttattaggtccgccgggcgcgggaaaaggtacccaaggccgtattatttcggcaaagactggcatcccgcatattagcacgggcgatatcctgcgtgacatcgtcgctaagcaaaacgatgaagttgcctcgagcattaaagagatcatgctgaaaggtgaactcgttccagatgaactgggtaatgcggtactgaaacgccgcctgtcggagaaagactgcgaaaaaggctttattttggatggtttcccgcgtaccgtgcgccaagcggaatatctggatagttttcttgaaagccagggccgccagttgacagccgccgtgctgattgaggtccccgaagatgaagttgttgcacgtctgctgtctcgccgtatctgtccgaaatgcgggcgtagttacaacatgatttttctgccaccaaaagaagacgagctgtgtgacgattgcggtgtcagcttagtacagcgtttagatgataaggaagaaacggtccgtcaccgcctgaaagtctaccgtgagaagacccagccggtcattgactattatagtaagaaaggtattctcgcacgcgtagatgggtcgcaaggaatcccacctatcgtggcagaagtcctggggattctgggttggagcgataag

SEQ ID NO: 2102 - protein, 231 aa, synthetic construct
  REGION 1..231: note = variant of adenylate kinase from Thermotoga neapolitana
MHHHHHHGGSGMGAYLVLLGPPGAGKGTQGRIISAKTGIPHISTGDILRDIVAKQNDEVASSIKEIMLKGELVPDELGNAVLKRRLSEKDCEKGFILDGFPRTVRQAEYLDSFLESQGRQLTAAVLIEVPEDEVVARLLSRRICPKCGRSYNMIFLPPKEDELCDDCGVSLVQRLDDKEETVRHRLKVYREKTQPVIDYYSKKGILARVDGSQGIPPIVAEVLGILGWSDK

SEQ ID NO: 2103 - DNA, 693 bp, synthetic construct
  misc_feature 1..693: note = variant of adenylate kinase from Thermotoga neapolitana
  source 1..693: mol_type = other DNA
atgcaccatcatcaccatcacgggggctccggcatgggggcatatctggtgttattaggtccgccgggcgcgggaaaaggtacccaaggccgtattatttcggcaaagactggcatcccgcatattagcacgggcgatatcctgcgtgacatcgtcgctaagcaaaacgatgaagttgcctcgagcattaaagagatcatgctgaaaggtgaactcgttccagatgaactgggtaatgcggtagtaaaacgccgcctgtcggagaaagactgcgaaaaaggctttattttggatggtttcccgcgtaccgtgcgccaagcggaatatctggatagttttcttgaaagccagggccgccagttgacagccgccgtgctgattgaggtccccgaagatgaagttgttttgcgtctgctgtctcgccgtatctgtccgaaatgcgggcgtagttacaacatgatttttctgccaccaaaagaagacgagctgtgtgacgattgcggtgtcagcttagtacagcgtttagatgataaggaagaaacggtccgtcaccgcctgaaagtctaccgtgagaagacccagccggtcattgactattatagtaagaaaggtattctcgcacgcgtagatgggtcgcaaggaatcccacctatcgtggcagaagtcctggggattctgggttggagcgataag

SEQ ID NO: 2104 - protein, 231 aa, synthetic construct
  REGION 1..231: note = variant of adenylate kinase from Thermotoga neapolitana
MHHHHHHGGSGMGAYLVLLGPPGAGKGTQGRIISAKTGIPHISTGDILRDIVAKQNDEVASSIKEIMLKGELVPDELGNAVVKRRLSEKDCEKGFILDGFPRTVRQAEYLDSFLESQGRQLTAAVLIEVPEDEVVLRLLSRRICPKCGRSYNMIFLPPKEDELCDDCGVSLVQRLDDKEETVRHRLKVYREKTQPVIDYYSKKGILARVDGSQGIPPIVAEVLGILGWSDK

SEQ ID NO: 2105 - DNA, 693 bp, synthetic construct
  misc_feature 1..693: note = variant of adenylate kinase from Thermotoga neapolitana
  source 1..693: mol_type = other DNA
atgcaccatcatcaccatcacgggggctccggcatgggggcatatctggtgttattaggtccgccgggcgcgggaaaaggtacccaaggccgtattatttcggcaaagactggcatcccgcatattagcacgggcgatatcctgcgtgacatcgtcgctaagcaaaacgatgaagttgcctcgagcattaaagagatcatgctgaaaggtgaactcgttccagatgaactgggtaatgcggtagtaaaacgccgcctgtcggagaaagactgcgaaaaaggctttattttggatggtttcccgcgtaccgtgcgccaagcggaatatctggatagttttcttgaaagccagggccgccagttgacagccgccgtgctgattgaggtccccgaagatgaagttgttgcacgtctgctgtctcgccgtatctgtccgaaatgcgggcgtagttacaacatgatttttctgccaccaaaagaagacgagctgtgtgacgattgcggtgtcagcttagtacagcgtttagatgataaggaagaaacggtccgtcaccgcctgaaagtctaccgtgagaagacccagccggtcattgactattatagtaagaaaggtattctcgcacgcgtagatgggtcgcaacttatcccacctatcgtggcagaagtcctggggattctgggttggagcgataag

SEQ ID NO: 2106 - protein, 231 aa, synthetic construct
  REGION 1..231: note = variant of adenylate kinase from Thermotoga neapolitana
MHHHHHHGGSGMGAYLVLLGPPGAGKGTQGRIISAKTGIPHISTGDILRDIVAKQNDEVASSIKEIMLKGELVPDELGNAVVKRRLSEKDCEKGFILDGFPRTVRQAEYLDSFLESQGRQLTAAVLIEVPEDEVVARLLSRRICPKCGRSYNMIFLPPKEDELCDDCGVSLVQRLDDKEETVRHRLKVYREKTQPVIDYYSKKGILARVDGSQLIPPIVAEVLGILGWSDK

SEQ ID NO: 2107 - DNA, 693 bp, synthetic construct
  misc_feature 1..693: note = variant of adenylate kinase from Thermotoga neapolitana
  source 1..693: mol_type = other DNA
atgcaccatcatcaccatcacgggggctccggcatgggggcatatctggtgttattaggtccgccgggcgcgggaaaaggtacccaaggccgtattatttcggcaaagactggcatcccgcatattagcacgggcgatatcctgcgtgacatcgtcgctaagcaaaacgatgaagttgcctcgagcattaaagagatcatgctgaaaggtgaactcgttccagatgaactgggtaatgcggtagtaaaacgccgcctgtcggagaaagactgcgaaaaaggctttattttggatggtttcccgcgtaccgtgcgccaagcggaatatctggatagttttcttgaaagccagggccgccagttgacagccgccgtgctgattgaggtccccgaagatgaagttgttgcacgtctgctgtctcgccgtatctgtccgaaatgcgggcgtagttacaacatgatttttctgccaccaaaagaagacgagctgtgtgacgattgcggtgtcagcttagtacagcgtttagatgataaggaagaaacggtccgtcaccgcctgaaagggtaccgtgagaagacccagccggtcattgactattatagtaagaaaggtattctcgcacgcgtagatgggtcgcaaggaatcccacctatcgtggcagaagtcctggggattctgggttggagcgataag

SEQ ID NO: 2108 - protein, 231 aa, synthetic construct
  REGION 1..231: note = variant of adenylate kinase from Thermotoga neapolitana
MHHHHHHGGSGMGAYLVLLGPPGAGKGTQGRIISAKTGIPHISTGDILRDIVAKQNDEVASSIKEIMLKGELVPDELGNAVVKRRLSEKDCEKGFILDGFPRTVRQAEYLDSFLESQGRQLTAAVLIEVPEDEVVARLLSRRICPKCGRSYNMIFLPPKEDELCDDCGVSLVQRLDDKEETVRHRLKGYREKTQPVIDYYSKKGILARVDGSQGIPPIVAEVLGILGWSDK

SEQ ID NO: 2109 - DNA, 693 bp, synthetic construct
  misc_feature 1..693: note = variant of adenylate kinase from Thermotoga neapolitana
  source 1..693: mol_type = other DNA
atgcaccatcatcaccatcacgggggctccggcatgggggcatatctggtgttattaggtccgccgggcgcgggaaaaggtacccaaggccgtattatttcggcaaagactggcatcccgcatattagcacgggcgatatcctgcgtgacatcgtcgctaagcaaaacgatgaagttgcctcgagcattaaagagatcatgctgaaaggtgaactcgttccagatgaactgggtaatgcggtagtaaaacgccgcctgtcggagaaagactgcgaaaaaggctttattttggatggtttcccgcgtaccgtgcgccaagcggaatatctggatagttttcttgaaagccagggccgccagttgacagccgccgtgctgattgaggtccccgaagatgaagttgttgcacgtctgctgtctcgccgtatctgtccgaaatgcgggcgtagttacaacatgatttttctgccaccaaaagaagacgagctgtgtgacgattgcggtgtcagcttagtacagcgtttagatgataaggaagaaacggtccgtcaccgcctgaaagtctaccgtgagaagacccagccggtcattgactattatagtaagaaaggtattctcgcacgcgtagatgggtcgcaaactatcccacctatcgtggcagaagtcctggggattctgggttggagcgataag

SEQ ID NO: 2110 - protein, 231 aa, synthetic construct
  REGION 1..231: note = variant of adenylate kinase from Thermotoga neapolitana
MHHHHHHGGSGMGAYLVLLGPPGAGKGTQGRIISAKTGIPHISTGDILRDIVAKQNDEVASSIKEIMLKGELVPDELGNAVVKRRLSEKDCEKGFILDGFPRTVRQAEYLDSFLESQGRQLTAAVLIEVPEDEVVARLLSRRICPKCGRSYNMIFLPPKEDELCDDCGVSLVQRLDDKEETVRHRLKVYREKTQPVIDYYSKKGILARVDGSQTIPPIVAEVLGILGWSDK

SEQ ID NO: 2111 - DNA, 693 bp, synthetic construct
  misc_feature 1..693: note = variant of adenylate kinase from Thermotoga neapolitana
  source 1..693: mol_type = other DNA
atgcaccatcatcaccatcacgggggctccggcatgggggcatatctggtgttattaggttctccgggcgcgggaaaaggtacccaaggccgtattatttcggcaaagactggcatcccgcatattagcacgggcgatatcctgcgtgacatcgtcgctaagcaaaacgatgaagttgcctcgagcattaaagagatcatgctgaaaggtgaactcgttccagatgaactgggtaatgcggtagtaaaacgccgcctgtcggagaaagactgcgaaaaaggctttattttggatggtttcccgcgtaccgtgcgccaagcggaatatctggatagttttcttgaaagccagggccgccagttgacagccgccgtgctgattgaggtccccgaagatgaagttgttgcacgtctgctgtctcgccgtatctgtccgaaatgcgggcgtagttacaacatgatttttctgccaccaaaagaagacgagctgtgtgacgattgcggtgtcagcttagtacagcgtttagatgataaggaagaaacggtccgtcaccgcctgaaagtctaccgtgagaagacccagccggtcattgactattatagtaagaaaggtattctcgcacgcgtagatgggtcgcaaggaatcccacctatcgtggcagaagtcctggggattctgggttggagcgataag

SEQ ID NO: 2112 - protein, 231 aa, synthetic construct
  REGION 1..231: note = variant of adenylate kinase from Thermotoga neapolitana
MHHHHHHGGSGMGAYLVLLGSPGAGKGTQGRIISAKTGIPHISTGDILRDIVAKQNDEVASSIKEIMLKGELVPDELGNAVVKRRLSEKDCEKGFILDGFPRTVRQAEYLDSFLESQGRQLTAAVLIEVPEDEVVARLLSRRICPKCGRSYNMIFLPPKEDELCDDCGVSLVQRLDDKEETVRHRLKVYREKTQPVIDYYSKKGILARVDGSQGIPPIVAEVLGILGWSDK

SEQ ID NO: 2113 - DNA, 693 bp, synthetic construct
  misc_feature 1..693: note = variant of adenylate kinase from Thermotoga neapolitana
  source 1..693: mol_type = other DNA
atgcaccatcatcaccatcacgggggctccggcatgggggcatatctggtgttattaggtccgccgggcgcgggaaaaggtacccaaggccgtattatttcggcaaagactggcatcccgcatattagcacgggcgatatcctgcgtgacatcgtcgctaagcaaaacgatgaagttgcctcgagcattaaagagacgatgctgaaaggtgaactcgttccagatgaactgggtaatgcggtagtaaaacgccgcctgtcggagaaagactgcgaaaaaggctttattttggatggtttcccgcgtaccgtgcgccaagcggaatatctggatagttttcttgaaagccagggccgccagttgacagccgccgtgctgattgaggtccccgaagatgaagttgttgcacgtctgctgtctcgccgtatctgtccgaaatgcgggcgtagttacaacatgatttttctgccaccaaaagaagacgagctgtgtgacgattgcggtgtcagcttagtacagcgtttagatgataaggaagaaacggtccgtcaccgcctgaaagtctaccgtgagaagacccagccggtcattgactattatagtaagaaaggtattctcgcacgcgtagatgggtcgcaaggaatcccacctatcgtggcagaagtcctggggattctgggttggagcgataag

SEQ ID NO: 2114 - protein, 231 aa, synthetic construct
  REGION 1..231: note = variant of adenylate kinase from Thermotoga neapolitana
MHHHHHHGGSGMGAYLVLLGPPGAGKGTQGRIISAKTGIPHISTGDILRDIVAKQNDEVASSIKETMLKGELVPDELGNAVVKRRLSEKDCEKGFILDGFPRTVRQAEYLDSFLESQGRQLTAAVLIEVPEDEVVARLLSRRICPKCGRSYNMIFLPPKEDELCDDCGVSLVQRLDDKEETVRHRLKVYREKTQPVIDYYSKKGILARVDGSQGIPPIVAEVLGILGWSDK

SEQ ID NO: 2115 - DNA, 693 bp, synthetic construct
  misc_feature 1..693: note = variant of adenylate kinase from Thermotoga neapolitana
  source 1..693: mol_type = other DNA
atgcaccatcatcaccatcacgggggctccggcatgggggcatatctggtgttattaggtccgccgggcgcgggaaaaggtacccaaggccgtattatttcggcaaagactggcatcccgcatattagcacgggcgatatcctgcgtgacatcgtcgctaagcaaaacgatgaagttgcctcgagcattaaagagatcatgctgaaaggtgaactcgttccagatgaactgggtaatgcggtagtaaaacgccgcctgtcggagaaagactgcgaaaaaggctttattttggatggtttcccgcgtaccgtgcgccaagcggaatatctggatagttttcttgaaagccagggccgccagttgacagccgccgtgctgattgaggtccccgaagatgaagttgttgcacgtctgctgtctcgccgtatctgtccgaaatgcgggcgtagttacaacatgatttttctgccaccaaaagaagacgagctgtgtgacgattgcggtgtcagcttagtacagcgtttagatgataaggaagaaacggtccgtcaccgcctgaaagtctaccgtgagaagacccagccggtcattgactattatagtaagaaaggtattctcgcacgcgtagatgggtcgcaaggaatcccagagatcgtggcagaagtcctggggattctgggttggagcgataag

SEQ ID NO: 2116 - protein, 231 aa, synthetic construct
  REGION 1..231: note = variant of adenylate kinase from Thermotoga neapolitana
MHHHHHHGGSGMGAYLVLLGPPGAGKGTQGRIISAKTGIPHISTGDILRDIVAKQNDEVASSIKEIMLKGELVPDELGNAVVKRRLSEKDCEKGFILDGFPRTVRQAEYLDSFLESQGRQLTAAVLIEVPEDEVVARLLSRRICPKCGRSYNMIFLPPKEDELCDDCGVSLVQRLDDKEETVRHRLKVYREKTQPVIDYYSKKGILARVDGSQGIPEIVAEVLGILGWSDK

SEQ ID NO: 2117 - DNA, 693 bp, synthetic construct
  misc_feature 1..693: note = variant of adenylate kinase from Thermotoga neapolitana
  source 1..693: mol_type = other DNA
atgcaccatcatcaccatcacgggggctccggcatgggggcatatctggtgttattaggtccgccgggcgcgggaaaaggtacccaaggccgtattatttcggcaaagactggcatcccgcatattagcacgggcgatatcctgcgtgacatcgtcgctaagcaaaacgatgaagttgcctcgagcattaaagagatcatgctgaaaggtgaactcgttccagatgaactgggtaatgcggtagtaaaacgccgcctgtcggagaaagactgcgaaaaaggctttattttggatggtttcccgcgtaccgtgcgccaagcggaatatctggatagttttcttgaaagccagggccgccagttgacagccgccgtgctgattgaggtccccgaagatgaagttgttgcacgtctgctgtctcgccgtatctgtccgaaatgcgggcgtagttacaacatgcggtttctgccaccaaaagaagacgagctgtgtgacgattgcggtgtcagcttagtacagcgtttagatgataaggaagaaacggtccgtcaccgcctgaaagtctaccgtgagaagacccagccggtcattgactattatagtaagaaaggtattctcgcacgcgtagatgggtcgcaaggaatcccacctatcgtggcagaagtcctggggattctgggttggagcgataag

SEQ ID NO: 2118 - protein, 231 aa, synthetic construct
  REGION 1..231: note = variant of adenylate kinase from Thermotoga neapolitana
MHHHHHHGGSGMGAYLVLLGPPGAGKGTQGRIISAKTGIPHISTGDILRDIVAKQNDEVASSIKEIMLKGELVPDELGNAVVKRRLSEKDCEKGFILDGFPRTVRQAEYLDSFLESQGRQLTAAVLIEVPEDEVVARLLSRRICPKCGRSYNMRFLPPKEDELCDDCGVSLVQRLDDKEETVRHRLKVYREKTQPVIDYYSKKGILARVDGSQGIPPIVAEVLGILGWSDK

SEQ ID NO: 2119 - DNA, 693 bp, synthetic construct
  misc_feature 1..693: note = variant of adenylate kinase from Thermotoga neapolitana
  source 1..693: mol_type = other DNA
atgcaccatcatcaccatcacgggggctccggcatgggggcatatctggtgttattaggtccgccgggcgcgggaaaaggtacccaaggccgtattatttcggcaaagactggcatcccgcatattagcacgggcgatatcctgcgtgacatcgtcgctaagcaaaacgatgaagttgcctcgagcattaaagagatcatgctgaaaggtgaactcgttccagatgaactgggtaatgcggtagtaaaacgccgcctgtcggagaaagactgcgaaaaaggctttattttggatggtttcccgcgtaccgtgcgccaagcggaatatctggatagttttcttgaaagccagggccgccagttgacagccgccgtgctgattgaggtccccgaagatgaagttgttgcacgtctgctgtctcgccgtatctgtccgaaatgcgggcgtagttacaacatgatttttctgccaccaaaagaagacgagctgtgtgacgattgcggtgtcagcttagtacagcgtttagatgataaggaagaaacggtccgtcaccgcctgaaagtctaccgtgagaagacccagccggtcattgactattatagtaagaaaggtattctcgcacgcgtagatgggtcgcaaggaatcacgcctatcgtggcagaagtcctggggattctgggttggagcgataag

SEQ ID NO: 2120 - protein, 231 aa, synthetic construct
  REGION 1..231: note = variant of adenylate kinase from Thermotoga neapolitana
MHHHHHHGGSGMGAYLVLLGPPGAGKGTQGRIISAKTGIPHISTGDILRDIVAKQNDEVASSIKEIMLKGELVPDELGNAVVKRRLSEKDCEKGFILDGFPRTVRQAEYLDSFLESQGRQLTAAVLIEVPEDEVVARLLSRRICPKCGRSYNMIFLPPKEDELCDDCGVSLVQRLDDKEETVRHRLKVYREKTQPVIDYYSKKGILARVDGSQGITPIVAEVLGILGWSDK

SEQ ID NO: 2121 - DNA, 693 bp, synthetic construct
  misc_feature 1..693: note = variant of adenylate kinase from Thermotoga neapolitana
  source 1..693: mol_type = other DNA
atgcaccatcatcaccatcacgggggctccggcatgggggcatatctggtgttattaggtccgccgggcgcgggaaaaggtacccaaggccgtattatttcggcaaagactggcatcccgcatattagcacgggcgatatcctgcgtgacatcgtcgctaagcaaaacgatgaagttgcctcgagcattaaagagatcatgctgaaaggtgaactcgttccagatgaactgggtaatgcggtagtaaaacgccgcctgtcggagaaagactgcgaaaaaggctttattttggatggtttcccgcgtaccgtgcgccaagcggaatatctggatagttttcttgaaagccagggccgccagttgacagccgccgtgctgattgaggtccccgaagatgtggttgttgcacgtctgctgtctcgccgtatctgtccgaaatgcgggcgtagttacaacatgatttttctgccaccaaaagaagacgagctgtgtgacgattgcggtgtcagcttagtacagcgtttagatgataaggaagaaacggtccgtcaccgcctgaaagtctaccgtgagaagacccagccggtcattgactattatagtaagaaaggtattctcgcacgcgtagatgggtcgcaaggaatcccacctatcgtggcagaagtcctggggattctgggttggagcgataag

SEQ ID NO: 2122 - protein, 231 aa, synthetic construct
  REGION 1..231: note = variant of adenylate kinase from Thermotoga neapolitana
MHHHHHHGGSGMGAYLVLLGPPGAGKGTQGRIISAKTGIPHISTGDILRDIVAKQNDEVASSIKEIMLKGELVPDELGNAVVKRRLSEKDCEKGFILDGFPRTVRQAEYLDSFLESQGRQLTAAVLIEVPEDVVVARLLSRRICPKCGRSYNMIFLPPKEDELCDDCGVSLVQRLDDKEETVRHRLKVYREKTQPVIDYYSKKGILARVDGSQGIPPIVAEVLGILGWSDK

SEQ ID NO: 2123 - DNA, 693 bp, synthetic construct
  misc_feature 1..693: note = variant of adenylate kinase from Thermotoga neapolitana
  source 1..693: mol_type = other DNA
atgcaccatcatcaccatcacgggggctccggcatgggggcatatctggtgttattaggtccgccgggcgcgggaaaaggtacccaaggccgtattatttcggcaaagactggcatcccgcatattagcacgggcgatatcctgcgtgacatcgtcgctaagcaaaacgatgaagttgcctcgagcattaaagagatcatgctgaaaggtacgctcgttccagatgaactgggtaatgcggtagtaaaacgccgcctgtcggagaaagactgcgaaaaaggctttattttggatggtttcccgcgtaccgtgcgccaagcggaatatctggatagttttcttgaaagccagggccgccagttgacagccgccgtgctgattgaggtccccgaagatgaagttgttgcacgtctgctgtctcgccgtatctgtccgaaatgcgggcgtagttacaacatgatttttctgccaccaaaagaagacgagctgtgtgacgattgcggtgtcagcttagtacagcgtttagatgataaggaagaaacggtccgtcaccgcctgaaagtctaccgtgagaagacccagccggtcattgactattatagtaagaaaggtattctcgcacgcgtagatgggtcgcaaggaatcccacctatcgtggcagaagtcctggggattctgggttggagcgataag

SEQ ID NO: 2124 - protein, 231 aa, synthetic construct
  REGION 1..231: note = variant of adenylate kinase from Thermotoga neapolitana
MHHHHHHGGSGMGAYLVLLGPPGAGKGTQGRIISAKTGIPHISTGDILRDIVAKQNDEVASSIKEIMLKGTLVPDELGNAVVKRRLSEKDCEKGFILDGFPRTVRQAEYLDSFLESQGRQLTAAVLIEVPEDEVVARLLSRRICPKCGRSYNMIFLPPKEDELCDDCGVSLVQRLDDKEETVRHRLKVYREKTQPVIDYYSKKGILARVDGSQGIPPIVAEVLGILGWSDK

SEQ ID NO: 2125 - DNA, 693 bp, synthetic construct
  misc_feature 1..693: note = variant of adenylate kinase from Thermotoga neapolitana
  source 1..693: mol_type = other DNA
atgcaccatcatcaccatcacgggggctccggcatgggggcatatctggtgttattaggtccgccgggcgcgggaaaaggtacccaaggccgtattatttcggcaaagactggcatcccgcatattagcacgggcgatatcctgcgtgacatcgtcgctaagcaaaacgatgaagttgcctcgagcattaaagagatcatgctgaaaggtgaactcgttccagatgaactgggtaatgcggtagtaaaacgccgcctgtcggagaaagactgcgaaaaaggctttattttggatggtttcccgcgtaccgtgcgccaagcggaatatctggatagttttcttgaaagccagggccgccagttgacagccgccgtgctgattgaggtccccgaagatgaagttgttgcacgtctgctgtctcgccgtatctgtccgaaatgcgggcgtagttacaacatgatttttctgccaccaaaagaagacgagctgtgtgacgattgcggtgtcagcttagtacagcgtttagatgataaggaagaaacggtccgtcaccgcctgaaagtctaccgtgagaagacccagccggtcattgactattatagtaagaaaggtattctcgcacgcgtagatgggtcgcaaaggatcccacctatcgtggcagaagtcctggggattctgggttggagcgataag

SEQ ID NO: 2126 - protein, 231 aa, synthetic construct
  REGION 1..231: note = variant of adenylate kinase from Thermotoga neapolitana
MHHHHHHGGSGMGAYLVLLGPPGAGKGTQGRIISAKTGIPHISTGDILRDIVAKQNDEVASSIKEIMLKGELVPDELGNAVVKRRLSEKDCEKGFILDGFPRTVRQAEYLDSFLESQGRQLTAAVLIEVPEDEVVARLLSRRICPKCGRSYNMIFLPPKEDELCDDCGVSLVQRLDDKEETVRHRLKVYREKTQPVIDYYSKKGILARVDGSQRIPPIVAEVLGILGWSDK

SEQ ID NO: 2127 - DNA, 693 bp, synthetic construct
  misc_feature 1..693: note = variant of adenylate kinase from Thermotoga neapolitana
  source 1..693: mol_type = other DNA
atgcaccatcatcaccatcacgggggctccggcatgggggcatatctggtgttattaggtccgccgggcgcgggaaaaggtacccaaggccgtattatttcggcaaagactggcatcccgcatattagcacgggcgatatcctgcgtgacatcgtcgctaagcaaaacgatgaagttgcctcgagcattaaagagatcatgctgaaaggtgaactcgttccagatgaactgggtaatgcggtagtaaaacgccgcctgtcggagaaagactgcgaaaaaggctttattttggatggtttcccgcgtaccgtgcgccaagcggaatatctggatagttttcttgaaagccagggccgccagttgacagccgccgtgctgattgaggtccccgaagatgaagttgttattcgtctgctgtctcgccgtatctgtccgaaatgcgggcgtagttacaacatgatttttctgccaccaaaagaagacgagctgtgtgacgattgcggtgtcagcttagtacagcgtttagatgataaggaagaaacggtccgtcaccgcctgaaagtctaccgtgagaagacccagccggtcattgactattatagtaagaaaggtattctcgcacgcgtagatgggtcgcaaggaatcccacctatcgtggcagaagtcctggggattctgggttggagcgataag

SEQ ID NO: 2128 - protein, 231 aa, synthetic construct
  REGION 1..231: note = variant of adenylate kinase from Thermotoga neapolitana
MHHHHHHGGSGMGAYLVLLGPPGAGKGTQGRIISAKTGIPHISTGDILRDIVAKQNDEVASSIKEIMLKGELVPDELGNAVVKRRLSEKDCEKGFILDGFPRTVRQAEYLDSFLESQGRQLTAAVLIEVPEDEVVIRLLSRRICPKCGRSYNMIFLPPKEDELCDDCGVSLVQRLDDKEETVRHRLKVYREKTQPVIDYYSKKGILARVDGSQGIPPIVAEVLGILGWSDK

SEQ ID NO: 2129 - DNA, 693 bp, synthetic construct
  misc_feature 1..693: note = variant of adenylate kinase from Thermotoga neapolitana
  source 1..693: mol_type = other DNA
atgcaccatcatcaccatcacgggggctccggcatgggggcatatctggtgttattaggtccgccgggcgcgggaaaaggtacccaaggccgtattatttcggcaaagactggcatcccgcatattagcacgggcgatatcctgcgtgacatcgtcgctaagcaaaacgatgaagttgcctcgagcattaaagagatcatgctgaaaggtgaactcgttccagatgaactgggtaatgcggtagtaaaacgccgcctgtcggagaaagactgcgaaaaaggctttattttggatggtttcccgcgtaccgtgcgccaagcggaatatctggatagttttcttgaaagccagggccgccagttgacagccgccgtgctgattgaggtccccgaagatgaagttgttgcacgtctgctgtctcgccgtatctgtccgaaatgcgggcgtagttacaacatgatttttctgccaccaaaagaagacgagctgtgtgacgattgcggtgtcagcttagtacagcgtttagatgataaggaagaaacggtccgtcaccgcctgaaagtctaccgtgagaagacccagccggtcattgactattatagtaagaaaggtattctcgcacgcgtagatgggcatcaaggaatcccacctatcgtggcagaagtcctggggattctgggttggagcgataag

SEQ ID NO: 2130 - protein, 231 aa, synthetic construct
  REGION 1..231: note = variant of adenylate kinase from Thermotoga neapolitana
MHHHHHHGGSGMGAYLVLLGPPGAGKGTQGRIISAKTGIPHISTGDILRDIVAKQNDEVASSIKEIMLKGELVPDELGNAVVKRRLSEKDCEKGFILDGFPRTVRQAEYLDSFLESQGRQLTAAVLIEVPEDEVVARLLSRRICPKCGRSYNMIFLPPKEDELCDDCGVSLVQRLDDKEETVRHRLKVYREKTQPVIDYYSKKGILARVDGHQGIPPIVAEVLGILGWSDK

SEQ ID NO: 2131 - DNA, 693 bp, synthetic construct
  misc_feature 1..693: note = variant of adenylate kinase from Thermotoga neapolitana
  source 1..693: mol_type = other DNA
atgcaccatcatcaccatcacgggggctccggcatgggggcatatctggtgttattaggtccgccgggcgcgggaaaaggtacccaaggccgtattatttcggcaaagactggcatcccgcatattagcacgggcgatatcctgcgtgacatcgtcgctaagcaaaacgatgaagttgcctcgagcattaaagagatcatgctgaaaggtgaactcgttccagatgaactgggtaatgcggtagtaaaacgccgcctgtcggagaaagactgcgaaaaaggctttattttggatggtttcccgcgtaccgtgcgccaagcggaatatctggatagttttcttgaaagccagggccgccagttgacagccgccgtgctgattgaggtccccgaagatgaagttgttgcacgtctgctgtctcgccgtatctgtccgaaatgcgggcgtagttacaacatgatttttctgccaccaaaagaagacgagctgtgtgacgattgcggtgtcagcttagtacagcgtttagatgataaggaagaaacggtccgtcaccgcctgaaagtctaccgtgagaagacccagccggtcattgactattatagtaagaaaggtattctcgcacgcgtagatgggtcgcaacctatcccacctatcgtggcagaagtcctggggattctgggttggagcgataag

SEQ ID NO: 2132 - protein, 231 aa, synthetic construct
  REGION 1..231: note = variant of adenylate kinase from Thermotoga neapolitana
MHHHHHHGGSGMGAYLVLLGPPGAGKGTQGRIISAKTGIPHISTGDILRDIVAKQNDEVASSIKEIMLKGELVPDELGNAVVKRRLSEKDCEKGFILDGFPRTVRQAEYLDSFLESQGRQLTAAVLIEVPEDEVVARLLSRRICPKCGRSYNMIFLPPKEDELCDDCGVSLVQRLDDKEETVRHRLKVYREKTQPVIDYYSKKGILARVDGSQPIPPIVAEVLGILGWSDK

SEQ ID NO: 2133 - DNA, 693 bp, synthetic construct
  misc_feature 1..693: note = variant of adenylate kinase from Thermotoga neapolitana
  source 1..693: mol_type = other DNA
atgcaccatcatcaccatcacgggggctccggcatgggggcatatctggtgttattaggtccgccgggcgcgggaaaaggtacccaaggccgtattatttcggcaaagactggcatcccgcatattagcacgggcgatatcctgcgtgacatcgtcgctaagcaaaacgatgaagttgcctcgagcattaaagagatcatgctgaaaggtgaactcgttccagatgaactgggtaatgcggtagtaaaacgccgcctgtcggagaaagactgcgaaaaaggctttattttggatggtttcccgcgtaccgtgcgccaagcggaatatctggatagttttcttgaaagccagggccgccagttgacagccgccgtgctgattgaggtccccgaagatgaagttgttgcacgtctgctgtctcgccgtatctgtccgaaatgcgggcgtagttacaacatgatttttctgccaccaaaagaagacgagctgtgtgacgattgcggtgtcagcttagtacagcgtttagatgataaggaagaaacggtccgtcaccgcctgaaagtctaccgtgagaagacccagccggtcattgactattatagtaagaaaggtattctcgcacgcgtagatgggtcgcaaggaatcccacctatcgtggcagaagtcctggggattctgggtcagagcgataag

SEQ ID NO: 2134 - protein, 231 aa, synthetic construct
  REGION 1..231: note = variant of adenylate kinase from Thermotoga neapolitana
MHHHHHHGGSGMGAYLVLLGPPGAGKGTQGRIISAKTGIPHISTGDILRDIVAKQNDEVASSIKEIMLKGELVPDELGNAVVKRRLSEKDCEKGFILDGFPRTVRQAEYLDSFLESQGRQLTAAVLIEVPEDEVVARLLSRRICPKCGRSYNMIFLPPKEDELCDDCGVSLVQRLDDKEETVRHRLKVYREKTQPVIDYYSKKGILARVDGSQGIPPIVAEVLGILGQSDK

SEQ ID NO: 2135 - DNA, 693 bp, synthetic construct
  misc_feature 1..693: note = variant of adenylate kinase from Thermotoga neapolitana
  source 1..693: mol_type = other DNA
atgcaccatcatcaccatcacgggggctccggcatgggggcatatctggtgttattaggtccgccgggcgcgggaaaaggtacccaaggccgtattatttcggcaaagactggcatcccgcatattagcacgggcgatatcctgcgtgacatcgtcgctaagcaaaacgatgaagttgcctcgagcattaaagagtggatgctgaaaggtgaactcgttccagatgaactgggtaatgcggtagtaaaacgccgcctgcgtgagaaagactgcgaaaaaggctttattttggatggtttcccgcgtaccgtgcgccaagcggaatatctggatagttttcttgaaagccagggccgccagttgacagccgccgtgctgattgaggtccccgaagatgaagttgttgcacgtctgctgtctcgccgtatctgtccgaaatgcgggcgtagttacaacatgatttttctgccaccaaaagaagacgagctgtgtgacgattgcggtgtcagcttagtacagcgtttagatgataaggaagaaacggtccgtcaccgcctgaaagtctaccgtgagaagacccagccggtcattgactattatagtaagaaaggtattctcgcacgcgtagatgggtcgcaaggaatcccacctatcgtggcagaagtcctggggattctgggttggagcgataag

SEQ ID NO: 2136 - protein, 231 aa, synthetic construct
  REGION 1..231: note = variant of adenylate kinase from Thermotoga neapolitana
MHHHHHHGGSGMGAYLVLLGPPGAGKGTQGRIISAKTGIPHISTGDILRDIVAKQNDEVASSIKEWMLKGELVPDELGNAVVKRRLREKDCEKGFILDGFPRTVRQAEYLDSFLESQGRQLTAAVLIEVPEDEVVARLLSRRICPKCGRSYNMIFLPPKEDELCDDCGVSLVQRLDDKEETVRHRLKVYREKTQPVIDYYSKKGILARVDGSQGIPPIVAEVLGILGWSDK

SEQ ID NO: 2137 - DNA, 693 bp, synthetic construct
  misc_feature 1..693: note = variant of adenylate kinase from Thermotoga neapolitana
  source 1..693: mol_type = other DNA
atgcaccatcatcaccatcacgggggctccggcatgggggcatatctggtgttattaggtccgccgggcgcgggaaaaggtacccaaggccgtattatttcggcaaagactggcatcccgcatattagcacgggcgatatcctgcgtgacatcgtcgctaagcaaaacgatgaagttgcctcgagcattaaagagtggatgctgaaaggtgaactcgttccagatgaactgggtaatgcggtagtaaaacgccgcctgaaggagaaagactgcgaaaaaggctttattttggatggtttcccgcgtaccgtgcgccaagcggaatatctggatagttttcttgaaagccagggccgccagttgacagccgccgtgctgattgaggtccccgaagatgaagttgttgcacgtctgctgtctcgccgtatctgtccgaaatgcgggcgtagttacaacatgatttttctgccaccaaaagaagacgagctgtgtgacgattgcggtgtcagcttagtacagcgtttagatgataaggaagaaacggtccgtcaccgcctgaaagtctaccgtgagaagacccagccggtcattgactattatagtaagaaaggtattctcgcacgcgtagatgggtcgcaaggaatcccacctatcgtggcagaagtcctggggattctgggttggagcgataag

SEQ ID NO: 2138 - protein, 231 aa, synthetic construct
  REGION 1..231: note = variant of adenylate kinase from Thermotoga neapolitana
MHHHHHHGGSGMGAYLVLLGPPGAGKGTQGRIISAKTGIPHISTGDILRDIVAKQNDEVASSIKEWMLKGELVPDELGNAVVKRRLKEKDCEKGFILDGFPRTVRQAEYLDSFLESQGRQLTAAVLIEVPEDEVVARLLSRRICPKCGRSYNMIFLPPKEDELCDDCGVSLVQRLDDKEETVRHRLKVYREKTQPVIDYYSKKGILARVDGSQGIPPIVAEVLGILGWSDK

SEQ ID NO: 2139 - DNA, 693 bp, synthetic construct
  misc_feature 1..693: note = variant of adenylate kinase from Thermotoga neapolitana
  source 1..693: mol_type = other DNA
atgcaccatcatcaccatcacgggggctccggcatgggggcatatctggtgttattaggtccgccgggcgcgggaaaaggtacccaaggccgtattatttcggcaaagactggcatcccgcatattagcacgggcgatatcctgcgtgacatcgtcgctaagcaaaacgatgaagttgcctcgagcattaaagagtggatgctgaaaggtgaactcgttccagatgaactgggtaatgcggtagtaaaacgccgcctgttggagaaagactgcgaaaaaggctttattttggatggtttcccgcgtaccgtgcgccaagcggaatatctggatagttttcttgaaagccagggccgccagttgacagccgccgtgctgattgaggtccccgaagatgaagttgttgcacgtctgctgtctcgccgtatctgtccgaaatgcgggcgtagttacaacatgatttttctgccaccaaaagaagacgagctgtgtgacgattgcggtgtcagcttagtacagcgtttagatgataaggaagaaacggtccgtcaccgcctgaaagtctaccgtgagaagacccagccggtcattgactattatagtaagaaaggtattctcgcacgcgtagatgggtcgcaaggaatcccacctatcgtggcagaagtcctggggattctgggttggagcgataag

SEQ ID NO: 2140 - protein, 231 aa, synthetic construct
  REGION 1..231: note = variant of adenylate kinase from Thermotoga neapolitana
MHHHHHHGGSGMGAYLVLLGPPGAGKGTQGRIISAKTGIPHISTGDILRDIVAKQNDEVASSIKEWMLKGELVPDELGNAVVKRRLLEKDCEKGFILDGFPRTVRQAEYLDSFLESQGRQLTAAVLIEVPEDEVVARLLSRRICPKCGRSYNMIFLPPKEDELCDDCGVSLVQRLDDKEETVRHRLKVYREKTQPVIDYYSKKGILARVDGSQGIPPIVAEVLGILGWSDK

SEQ ID NO: 2141 - DNA, 693 bp, synthetic construct
  misc_feature 1..693: note = variant of adenylate kinase from Thermotoga neapolitana
  source 1..693: mol_type = other DNA
atgcaccatcatcaccatcacgggggctccggcatgggggcatatctggtgttattaggtccgccgggcgcgggaaaaggtacccaaggccgtattatttcggcaaagactggcatcccgcatattagcacgggcgatatcctgcgtgacatcgtcgctaagcaaaacgatgaagttgcctcgagcattaaagagtggatgctgaaaggtgaactcgttccagatgaactgggtaatgcggtagtaaaacgccgcctgtcggagaaagactgcgaaaaaggctttattttggatggtttcccgcgtaccgtgcgccaagcggaatatctggatagttttcttgaaagccagggccgccagttgacagccgccgtgctgattgaggtccccgaagatgaagttgttgcacgtctgctgtctcgccgtatctgtccgaaatgcgggcgtagttacaacatgatttttctgccaccaaaagaagacgagctgtgtgacgattgcggtgtcagcttagtacagcgtttagatgataaggaagaaacggtccgtcaccgcctgaaagtctaccgtgagaagacccggccggtcattgactattatagtaagaaaggtattctcgcacgcgtagatgggtcgcaaggaatcccacctatcgtggcagaagtcctggggattctgggttggagcgataag

SEQ ID NO: 2142 - protein, 231 aa, synthetic construct
  REGION 1..231: note = variant of adenylate kinase from Thermotoga neapolitana
MHHHHHHGGSGMGAYLVLLGPPGAGKGTQGRIISAKTGIPHISTGDILRDIVAKQNDEVASSIKEWMLKGELVPDELGNAVVKRRLSEKDCEKGFILDGFPRTVRQAEYLDSFLESQGRQLTAAVLIEVPEDEVVARLLSRRICPKCGRSYNMIFLPPKEDELCDDCGVSLVQRLDDKEETVRHRLKVYREKTRPVIDYYSKKGILARVDGSQGIPPIVAEVLGILGWSDK

SEQ ID NO: 2143 - DNA, 693 bp, synthetic construct
  misc_feature 1..693: note = variant of adenylate kinase from Thermotoga neapolitana
  source 1..693: mol_type = other DNA
atgcaccatcatcaccatcacgggggctccggcatgggggcatatctggtgttattaggtccgccgggcgcgggaaaaggtacccaaggccgtattatttcggcaaagactggcatcccgcatattagcacgggcgatatcctgcgtgacatcgtcgctaagcaaaacgatgaagttgcctcgagcattaaagagtggatgctgaaaggtgaactcgttccagatgaactgggtaatgcggtagtaaaacgccgcctgtcggagaaagactgcgaaaaaggctttattttggatggtttcccgcgtaccgtgcgccaagcggaatatctggatagttttcttgaaagccagggccgccagttgacagccgccgtgctgattgaggtccccgaagatgaagttgttgcacgtctgctgtctcgccgtatctgtccgaaatgcgggcgtagttacaacatgatttttctgccaccaaaagaagacgagctgtgtgacgattgcggtgtcagcttagtacagcgtttagatgataaggaagaaacggtccgtcaccgcctgaaagtctaccgtgagaagacccagccggtcttggactattatagtaagaaaggtattctcgcacgcgtagatgggtcgcaaggaatcccacctatcgtggcagaagtcctggggattctgggttggagcgataag

SEQ ID NO: 2144 - protein, 231 aa, synthetic construct
  REGION 1..231: note = variant of adenylate kinase from Thermotoga neapolitana
MHHHHHHGGSGMGAYLVLLGPPGAGKGTQGRIISAKTGIPHISTGDILRDIVAKQNDEVASSIKEWMLKGELVPDELGNAVVKRRLSEKDCEKGFILDGFPRTVRQAEYLDSFLESQGRQLTAAVLIEVPEDEVVARLLSRRICPKCGRSYNMIFLPPKEDELCDDCGVSLVQRLDDKEETVRHRLKVYREKTQPVLDYYSKKGILARVDGSQGIPPIVAEVLGILGWSDK

SEQ ID NO: 2145 - DNA, 693 bp, synthetic construct
  misc_feature 1..693: note = variant of adenylate kinase from Thermotoga neapolitana
  source 1..693: mol_type = other DNA
atgcaccatcatcaccatcacgggggctccggcatgggggcatatctggtgttattaggtccgccgggcgcgggaaaaggtacccaaggccgtattatttcggcaaagactggcatcccgcatattagcacgggcgatatcctgcgtgacatcgtcgctaagcaaaacgatgaagttgcctcgagcattaaagagtggatgctgaaaggtgaactcgttccagatgaactgggtaatgcggtagtaaaacgccgcctgtatgagaaagactgcgaaaaaggctttattttggatggtttcccgcgtaccgtgcgccaagcggaatatctggatagttttcttgaaagccagggccgccagttgacagccgccgtgctgattgaggtccccgaagatgaagttgttgcacgtctgctgtctcgccgtatctgtccgaaatgcgggcgtagttacaacatgatttttctgccaccaaaagaagacgagctgtgtgacgattgcggtgtcagcttagtacagcgtttagatgataaggaagaaacggtccgtcaccgcctgaaagtctaccgtgagaagacccagccggtcattgactattatagtaagaaaggtattctcgcacgcgtagatgggtcgcaaggaatcccacctatcgtggcagaagtcctggggattctgggttggagcgataag

SEQ ID NO: 2146 - protein, 231 aa, synthetic construct
  REGION 1..231: note = variant of adenylate kinase from Thermotoga neapolitana
MHHHHHHGGSGMGAYLVLLGPPGAGKGTQGRIISAKTGIPHISTGDILRDIVAKQNDEVASSIKEWMLKGELVPDELGNAVVKRRLYEKDCEKGFILDGFPRTVRQAEYLDSFLESQGRQLTAAVLIEVPEDEVVARLLSRRICPKCGRSYNMIFLPPKEDELCDDCGVSLVQRLDDKEETVRHRLKVYREKTQPVIDYYSKKGILARVDGSQGIPPIVAEVLGILGWSDK

SEQ ID NO: 2147 - DNA, 693 bp, synthetic construct
  misc_feature 1..693: note = variant of adenylate kinase from Thermotoga neapolitana
  source 1..693: mol_type = other DNA
atgcaccatcatcaccatcacgggggctccggcatgggggcatatctggtgttattaggtccgccgggcgcgggaaaaggtacccaaggccgtattatttcggcaaagactggcatcccgcatattagcacgggcgatatcctgcgtgacatcgtcgctaagcaaaacgatgaagttgcctcgagcattaaagagtggatgctgaaaggtgaactcgttccagatgaactgggtaatgcggtagtaaaacgccgcctgtcggagaaagactgcgaagggggctttattttggatggtttcccgcgtaccgtgcgccaagcggaatatctggatagttttcttgaaagccagggccgccagttgacagccgccgtgctgattgaggtccccgaagatgaagttgttgcacgtctgctgtctcgccgtatctgtccgaaatgcgggcgtagttacaacatgatttttctgccaccaaaagaagacgagctgtgtgacgattgcggtgtcagcttagtacagcgtttagatgataaggaagaaacggtccgtcaccgcctgaaagtctaccgtgagaagacccagccggtcattgactattatagtaagaaaggtattctcgcacgcgtagatgggtcgcaaggaatcccacctatcgtggcagaagtcctggggattctgggttggagcgataag

SEQ ID NO: 2148 - protein, 231 aa, synthetic construct
  REGION 1..231: note = variant of adenylate kinase from Thermotoga neapolitana
MHHHHHHGGSGMGAYLVLLGPPGAGKGTQGRIISAKTGIPHISTGDILRDIVAKQNDEVASSIKEWMLKGELVPDELGNAVVKRRLSEKDCEGGFILDGFPRTVRQAEYLDSFLESQGRQLTAAVLIEVPEDEVVARLLSRRICPKCGRSYNMIFLPPKEDELCDDCGVSLVQRLDDKEETVRHRLKVYREKTQPVIDYYSKKGILARVDGSQGIPPIVAEVLGILGWSDK

SEQ ID NO: 2149 - DNA, 693 bp, synthetic construct
  misc_feature 1..693: note = variant of adenylate kinase from Thermotoga neapolitana
  source 1..693: mol_type = other DNA
atgcaccatcatcaccatcacgggggctccggcatgggggcatatctggtgttattaggtccgccgggcgcgggaaaaggtacccaaggccgtattatttcggcaaagactggcatcccgcatattagcacgggcgatatcctgcgtgacatcgtcgctaagcaaaacgatgaagttgcctcgagcattaaagagtggatgctgaaaggtgaactcgttccagatgaactgggtaatgcggtagtaaaacgccgcctgtcggagaaagactgcgaaaaaggctttattttggatggtttcccgcgtaccgtgcgccaagcggaatatctggatagttttcttgaaagccagggccgccagttgacagccgccgtgctgattgaggtccccgaagatgaagttgttgcacgtctgctgtctcgccgtatctgtccgaaatgcgggcgtagttacaacatgatttttctgccaccaaaagaagacgagctgtgtgacgattgcggtgtcagcttagtacagcgtttagatgataaggaagaaacggtccgtcaccgcctgaaagtctaccgtgagaagacccagccggtcattgactattatagtgagaaaggtattctcgcacgcgtagatgggtcgcaaggaatcccacctatcgtggcagaagtcctggggattctgggttggagcgataag

SEQ ID NO: 2150 - protein, 231 aa, synthetic construct
  REGION 1..231: note = variant of adenylate kinase from Thermotoga neapolitana
MHHHHHHGGSGMGAYLVLLGPPGAGKGTQGRIISAKTGIPHISTGDILRDIVAKQNDEVASSIKEWMLKGELVPDELGNAVVKRRLSEKDCEKGFILDGFPRTVRQAEYLDSFLESQGRQLTAAVLIEVPEDEVVARLLSRRICPKCGRSYNMIFLPPKEDELCDDCGVSLVQRLDDKEETVRHRLKVYREKTQPVIDYYSEKGILARVDGSQGIPPIVAEVLGILGWSDK

SEQ ID NO: 2151 - DNA, 693 bp, synthetic construct
  misc_feature 1..693: note = variant of adenylate kinase from Thermotoga neapolitana
  source 1..693: mol_type = other DNA
atgcaccatcatcaccatcacgggggctccggcatgggggcatatctggtgttattaggtccgccgggcgcgggaaaaggtacccaaggccgtattatttcggcaaagacttgtatcccgcatattagcacgggcgatatcctgcgtgacatcgtcgctaagcaaaacgatgaagttgcctcgagcattaaagagtggatgctgaaaggtgaactcgttccagatgaactgggtaatgcggtagtaaaacgccgcctgtcggagaaagactgcgaaaaaggctttattttggatggtttcccgcgtaccgtgcgccaagcggaatatctggatagttttcttgaaagccagggccgccagttgacagccgccgtgctgattgaggtccccgaagatgaagttgttgcacgtctgctgtctcgccgtatctgtccgaaatgcgggcgtagttacaacatgatttttctgccaccaaaagaagacgagctgtgtgacgattgcggtgtcagcttagtacagcgtttagatgataaggaagaaacggtccgtcaccgcctgaaagtctaccgtgagaagacccagccggtcattgactattatagtaagaaaggtattctcgcacgcgtagatgggtcgcaaggaatcccacctatcgtggcagaagtcctggggattctgggttggagcgataag

SEQ ID NO: 2152 - protein, 231 aa, synthetic construct
  REGION 1..231: note = variant of adenylate kinase from Thermotoga neapolitana
MHHHHHHGGSGMGAYLVLLGPPGAGKGTQGRIISAKTCIPHISTGDILRDIVAKQNDEVASSIKEWMLKGELVPDELGNAVVKRRLSEKDCEKGFILDGFPRTVRQAEYLDSFLESQGRQLTAAVLIEVPEDEVVARLLSRRICPKCGRSYNMIFLPPKEDELCDDCGVSLVQRLDDKEETVRHRLKVYREKTQPVIDYYSKKGILARVDGSQGIPPIVAEVLGILGWSDK

SEQ ID NO: 2153 - DNA, 693 bp, synthetic construct
  misc_feature 1..693: note = variant of adenylate kinase from Thermotoga neapolitana
  source 1..693: mol_type = other DNA
atgcaccatcatcaccatcacgggggctccggcatgggggcatatctggtgttattaggtccgccgggcgcgggaaaaggtacccaaggccgtattatttcggcaaagactggcatcccgcatattagcacgggcgatatcctgcgtgacatcgtcgctaagcaaaacgatgaagttgcctcgagcattaaagagtggatgctgaaaggtgaactcgttccagatgaactgggtaatgcggtagtaaaacgccgcctgtcggagaaagacgttgaaaaaggctttattttggatggtttcccgcgtaccgtgcgccaagcggaatatctggatagttttcttgaaagccagggccgccagttgacagccgccgtgctgattgaggtccccgaagatgaagttgttgcacgtctgctgtctcgccgtatctgtccgaaatgcgggcgtagttacaacatgatttttctgccaccaaaagaagacgagctgtgtgacgattgcggtgtcagcttagtacagcgtttagatgataaggaagaaacggtccgtcaccgcctgaaagtctaccgtgagaagacccagccggtcattgactattatagtaagaaaggtattctcgcacgcgtagatgggtcgcaaggaatcccacctatcgtggcagaagtcctggggattctgggttggagcgataag

SEQ ID NO: 2154 - protein, 231 aa, synthetic construct
  REGION 1..231: note = variant of adenylate kinase from Thermotoga neapolitana
MHHHHHHGGSGMGAYLVLLGPPGAGKGTQGRIISAKTGIPHISTGDILRDIVAKQNDEVASSIKEWMLKGELVPDELGNAVVKRRLSEKDVEKGFILDGFPRTVRQAEYLDSFLESQGRQLTAAVLIEVPEDEVVARLLSRRICPKCGRSYNMIFLPPKEDELCDDCGVSLVQRLDDKEETVRHRLKVYREKTQPVIDYYSKKGILARVDGSQGIPPIVAEVLGILGWSDK

SEQ ID NO: 2155 - DNA, 693 bp, synthetic construct
  misc_feature 1..693: note = variant of adenylate kinase from Thermotoga neapolitana
  source 1..693: mol_type = other DNA
atgcaccatcatcaccatcacgggggctccggcatgggggcatatctggtgttattaggtccgccgggcgcgggaaaaggtacccaaggccgtattatttcggcaaagactggcatcccgcatattagcacgggcgatatcctgcgtgacatcgtcgctaagcaaaacgatgaagttgcctcgagcattaaagagtggatgctgaaaggtgaactcgttccagatgaactgggtaatgcggtagtaaaacgccgcctgtcggagaaagactgcgaaaaaggctttattttggatggtttcccgcgtaccgtgcgccaagcggaatatctggatagttttcttgaaagccagggccgccagttgacagccgccgtgctgattgaggtccccgaagatgaagttgttgcacgtctgctgtctcgccgtatctgtccgaaatgcgggcgtagttacaacatgatttttctgccaccaaaagaagacgagctgtgtgacgattgcggtgtcagcttagtacagcgtttagatgataaggaagaaacggtccgtcaccgcctgaaagtctaccgtgagaagaccttgccggtcattgactattatagtaagaaaggtattctcgcacgcgtagatgggtcgcaaggaatcccacctatcgtggcagaagtcctggggattctgggttggagcgataag

SEQ ID NO: 2156 - protein, 231 aa, synthetic construct
  REGION 1..231: note = variant of adenylate kinase from Thermotoga neapolitana
MHHHHHHGGSGMGAYLVLLGPPGAGKGTQGRIISAKTGIPHISTGDILRDIVAKQNDEVASSIKEWMLKGELVPDELGNAVVKRRLSEKDCEKGFILDGFPRTVRQAEYLDSFLESQGRQLTAAVLIEVPEDEVVARLLSRRICPKCGRSYNMIFLPPKEDELCDDCGVSLVQRLDDKEETVRHRLKVYREKTLPVIDYYSKKGILARVDGSQGIPPIVAEVLGILGWSDK

SEQ ID NO: 2157 - DNA, 693 bp, synthetic construct
  misc_feature 1..693: note = variant of adenylate kinase from Thermotoga neapolitana
  source 1..693: mol_type = other DNA
atgcaccatcatcaccatcacgggggctccggcatgggggcatatctggtgttattaggtccgccgggcgcgggaaaaggtacccaaggccgtattatttcggcaaagactggcatcccgcatattagcacgggcgatatcctgcgtgacatcgtcgctaagcaaaacgatgaagttgcctcgagcattaaagagtggatgctgaaaggtgaactcgttccagatgaactgggtaatgcggtagtaaaacgccgcctgtcggagaaagactgcgaaaaaggctttattttggatggtttcccgcgtaccgtgcgccaagcggaatatctggatagttttcttgaaagccagggccgccagttgacagccgccgtgctgattgaggtccccgaagatgaagttgttgcacgtctgctgtctcgccgtatctgtccgaaatgcgggcgtagttacaacatgatttttctgccaccaaaagaagacgagctgtgtgacgattgcggtgtcagcttagtacagcgtttagatgataaggaagaaacggtccttcaccgcctgaaagtctaccgtgagaagacccagccggtcattgactattatagtaagaaaggtattctcgcacgcgtagatgggtcgcaaggaatcccacctatcgtggcagaagtcctggggattctgggttggagcgataag

SEQ ID NO: 2158 - protein, 231 aa, synthetic construct
  REGION 1..231: note = variant of adenylate kinase from Thermotoga neapolitana
MHHHHHHGGSGMGAYLVLLGPPGAGKGTQGRIISAKTGIPHISTGDILRDIVAKQNDEVASSIKEWMLKGELVPDELGNAVVKRRLSEKDCEKGFILDGFPRTVRQAEYLDSFLESQGRQLTAAVLIEVPEDEVVARLLSRRICPKCGRSYNMIFLPPKEDELCDDCGVSLVQRLDDKEETVLHRLKVYREKTQPVIDYYSKKGILARVDGSQGIPPIVAEVLGILGWSDK

SEQ ID NO: 2159 - DNA, 693 bp, synthetic construct
  misc_feature 1..693: note = variant of adenylate kinase from Thermotoga neapolitana
  source 1..693: mol_type = other DNA
atgcaccatcatcaccatcacgggggctccggcatgggggcatatctggtgttattaggtccgccgggcgcgggaaaaggtacccaaggccgtattatttcggcaaagactggcatcccgcatattagcacgggcgatatcctgcgtgacatcgtcgctaagcaaaacgatgaagttgcctcgagcattaaagagtggatgctgaaaggtgaactcgttccagatgaactgggtaatgcggtagtaaaacgccgcctgtcggagaaagactgcgaaacgggctttattttggatggtttcccgcgtaccgtgcgccaagcggaatatctggatagttttcttgaaagccagggccgccagttgacagccgccgtgctgattgaggtccccgaagatgaagttgttgcacgtctgctgtctcgccgtatctgtccgaaatgcgggcgtagttacaacatgatttttctgccaccaaaagaagacgagctgtgtgacgattgcggtgtcagcttagtacagcgtttagatgataaggaagaaacggtccgtcaccgcctgaaagtctaccgtgagaagacccagccggtcattgactattatagtaagaaaggtattctcgcacgcgtagatgggtcgcaaggaatcccacctatcgtggcagaagtcctggggattctgggttggagcgataag

SEQ ID NO: 2160 - protein, 231 aa, synthetic construct
  REGION 1..231: note = variant of adenylate kinase from Thermotoga neapolitana
MHHHHHHGGSGMGAYLVLLGPPGAGKGTQGRIISAKTGIPHISTGDILRDIVAKQNDEVASSIKEWMLKGELVPDELGNAVVKRRLSEKDCETGFILDGFPRTVRQAEYLDSFLESQGRQLTAAVLIEVPEDEVVARLLSRRICPKCGRSYNMIFLPPKEDELCDDCGVSLVQRLDDKEETVRHRLKVYREKTQPVIDYYSKKGILARVDGSQGIPPIVAEVLGILGWSDK

SEQ ID NO: 2161 - DNA, 693 bp, synthetic construct
  misc_feature 1..693: note = variant of adenylate kinase from Thermotoga neapolitana
  source 1..693: mol_type = other DNA
atgcaccatcatcaccatcacgggggctccggcatgggggcatatctggtgttattaggtccgccgggcgcgggaaaaggtacccaaggccgtattatttcggcaaagactggcacgccgcatattagcacgggcgatatcctgcgtgacatcgtcgctaagcaaaacgatgaagttgcctcgagcattaaagagtggatgctgaaaggtgaactcgttccagatgaactgggtaatgcggtagtaaaacgccgcctgtcggagaaagactgcgaaaaaggctttattttggatggtttcccgcgtaccgtgcgccaagcggaatatctggatagttttcttgaaagccagggccgccagttgacagccgccgtgctgattgaggtccccgaagatgaagttgttgcacgtctgctgtctcgccgtatctgtccgaaatgcgggcgtagttacaacatgatttttctgccaccaaaagaagacgagctgtgtgacgattgcggtgtcagcttagtacagcgtttagatgataaggaagaaacggtccgtcaccgcctgaaagtctaccgtgagaagacccagccggtcattgactattatagtaagaaaggtattctcgcacgcgtagatgggtcgcaaggaatcccacctatcgtggcagaagtcctggggattctgggttggagcgataag

SEQ ID NO: 2162 - protein, 231 aa, synthetic construct
  REGION 1..231: note = variant of adenylate kinase from Thermotoga neapolitana
MHHHHHHGGSGMGAYLVLLGPPGAGKGTQGRIISAKTGTPHISTGDILRDIVAKQNDEVASSIKEWMLKGELVPDELGNAVVKRRLSEKDCEKGFILDGFPRTVRQAEYLDSFLESQGRQLTAAVLIEVPEDEVVARLLSRRICPKCGRSYNMIFLPPKEDELCDDCGVSLVQRLDDKEETVRHRLKVYREKTQPVIDYYSKKGILARVDGSQGIPPIVAEVLGILGWSDK

SEQ ID NO: 2163 - DNA, 693 bp, synthetic construct
  misc_feature 1..693: note = variant of adenylate kinase from Thermotoga neapolitana
  source 1..693: mol_type = other DNA
atgcaccatcatcaccatcacgggggctccggcatgggggcatatctggtgttattaggtccgccgggcgcgggaaaaggtacccaaggccgtattatttcggcaaagactggcatcccgcatattagcacgggcgatatcctgcgtgacatcgtcgctaagcaaaacgatgaagttgcctcgagcattaaagagtggatgctgaaaggtgaactcgttccagatgaactgggtaatgcggtagtaaaacgccgcctgtcggagaaagacctggaaaaaggctttattttggatggtttcccgcgtaccgtgcgccaagcggaatatctggatagttttcttgaaagccagggccgccagttgacagccgccgtgctgattgaggtccccgaagatgaagttgttgcacgtctgctgtctcgccgtatctgtccgaaatgcgggcgtagttacaacatgatttttctgccaccaaaagaagacgagctgtgtgacgattgcggtgtcagcttagtacagcgtttagatgataaggaagaaacggtccgtcaccgcctgaaagtctaccgtgagaagacccagccggtcattgactattatagtaagaaaggtattctcgcacgcgtagatgggtcgcaaggaatcccacctatcgtggcagaagtcctggggattctgggttggagcgataag

SEQ ID NO: 2164 - protein, 231 aa, synthetic construct
  REGION 1..231: note = variant of adenylate kinase from Thermotoga neapolitana
MHHHHHHGGSGMGAYLVLLGPPGAGKGTQGRIISAKTGIPHISTGDILRDIVAKQNDEVASSIKEWMLKGELVPDELGNAVVKRRLSEKDLEKGFILDGFPRTVRQAEYLDSFLESQGRQLTAAVLIEVPEDEVVARLLSRRICPKCGRSYNMIFLPPKEDELCDDCGVSLVQRLDDKEETVRHRLKVYREKTQPVIDYYSKKGILARVDGSQGIPPIVAEVLGILGWSDK

SEQ ID NO: 2165 - DNA, 693 bp, synthetic construct
  misc_feature 1..693: note = variant of adenylate kinase from Thermotoga neapolitana
  source 1..693: mol_type = other DNA
atgcaccatcatcaccatcacgggggctccggcatgggggcatatctggtgttattaggtccgccgggcgcgggaaaaggtacccaaggccgtattatttcggcaaagactggcatcccgcatattagcacgggcgatatcctgcgtgacatcgtcgctaagcaaaacgatgaagttgcctcgagcattaaagagtggatgctgaaaggtgaactcgttccagatgaactgggtaatgcggtagtaaaacgccgcctgtcggagaaagactgcgaaaaaggctttattttggatggtttcccgcgtaccgtgcgccaagcggaatatctggatagttttcttgaaagccagggccgccagttgacagccgccgtgctgattgaggtccccgaagatgaagttgttgcacgtctgctgtctcgccgtatctgtccgcattgcgggcgtagttacaacatgatttttctgccaccaaaagaagacgagctgtgtgacgattgcggtgtcagcttagtacagcgtttagatgataaggaagaaacggtccgtcaccgcctgaaagtctaccgtgagaagacccagccggtcattgactattatagtaagaaaggtattctcgcacgcgtagatgggtcgcaaggaatcccacctatcgtggcagaagtcctggggattctgggttggagcgataag

SEQ ID NO: 2166 - protein, 231 aa, synthetic construct
  REGION 1..231: note = variant of adenylate kinase from Thermotoga neapolitana
MHHHHHHGGSGMGAYLVLLGPPGAGKGTQGRIISAKTGIPHISTGDILRDIVAKQNDEVASSIKEWMLKGELVPDELGNAVVKRRLSEKDCEKGFILDGFPRTVRQAEYLDSFLESQGRQLTAAVLIEVPEDEVVARLLSRRICPHCGRSYNMIFLPPKEDELCDDCGVSLVQRLDDKEETVRHRLKVYREKTQPVIDYYSKKGILARVDGSQGIPPIVAEVLGILGWSDK

SEQ ID NO: 2167 - DNA, 693 bp, synthetic construct
  misc_feature 1..693: note = variant of adenylate kinase from Thermotoga neapolitana
  source 1..693: mol_type = other DNA
atgcaccatcatcaccatcacgggggctccggcatgggggcatatctggtgttattaggtccgccgggcgcgggaaaaggtacccaaggccgtattatttcggcaaagactggcatcccgcatattagcacgggcgatatcctgcgtgacatcgtcgctaagcaaaacgatgaagttgcctcgagcattaaagagtggatgctgaaaggtgaactcgttccagatgaactgggtaatgcggtagtaaaacgccgcctgtcggagaaagactgcgaaaaaggctttattttggatggtttcccgcgtaccgtgcgccaagcggaatatctggatagttttcttgaaagccagggccgccagttgacagccgccgtgctgattgaggtccccgaagatgaagttgttgcacgtctgctgtctcgccgtatctgtccgaaatgcgggcgtagttacaacatgatttttctgccaccaaaagaagacgagctgtgtgacgattgcggtgtcagcttagtacagcgtttagatgataaggaagaaacggtccgtcaccgcctgaaagtctaccgtgagaagacccagccggtcattgactattatagtaaggagggtattctcgcacgcgtagatgggtcgcaaggaatcccacctatcgtggcagaagtcctggggattctgggttggagcgataag

SEQ ID NO: 2168 - protein, 231 aa, synthetic construct
  REGION 1..231: note = variant of adenylate kinase from Thermotoga neapolitana
MHHHHHHGGSGMGAYLVLLGPPGAGKGTQGRIISAKTGIPHISTGDILRDIVAKQNDEVASSIKEWMLKGELVPDELGNAVVKRRLSEKDCEKGFILDGFPRTVRQAEYLDSFLESQGRQLTAAVLIEVPEDEVVARLLSRRICPKCGRSYNMIFLPPKEDELCDDCGVSLVQRLDDKEETVRHRLKVYREKTQPVIDYYSKEGILARVDGSQGIPPIVAEVLGILGWSDK

SEQ ID NO: 2169 - DNA, 693 bp, synthetic construct
  misc_feature 1..693: note = variant of adenylate kinase from Thermotoga neapolitana
  source 1..693: mol_type = other DNA
atgcaccatcatcaccatcacgggggctccggcatgggggcatatctggtgttattaggtccgccgggcgcgggaaaaggtacccaaggccgtattatttcggcaaagactggcatcccgcatattagcacgggcgatatcctgcgtgacatcgtcgctaagcaaaacgatgaagttgcctcgagcattaaagagtggatgctgaaaggtgaactcgttccagatgaactgggtaatgcggtagtaaaacgccgcctgtcggagaaagactgcgaaaaaggctttattttggatggtttcccgcgtaccgtgcgccaagcggaatatctggatagttttcttgaaagccagggccgccagttgacagccgccgtgctgattgaggtccccgaagatgaagttgttgcacgtctgctgtctcgccgtatctgtccgaaatgcgggcgtagttacaacatgatttttctgccaccaaaagaagacgagctgtgtgacgattgcggtgtcagcttagtacagcgtttagatgataaggaagaaacggtccgtcaccgcctgaaagtctaccgtgagaagacccagccggtcattgactattatagtaagttgggtattctcgcacgcgtagatgggtcgcaaggaatcccacctatcgtggcagaagtcctggggattctgggttggagcgataag

SEQ ID NO: 2170 - protein, 231 aa, synthetic construct
  REGION 1..231: note = variant of adenylate kinase from Thermotoga neapolitana
MHHHHHHGGSGMGAYLVLLGPPGAGKGTQGRIISAKTGIPHISTGDILRDIVAKQNDEVASSIKEWMLKGELVPDELGNAVVKRRLSEKDCEKGFILDGFPRTVRQAEYLDSFLESQGRQLTAAVLIEVPEDEVVARLLSRRICPKCGRSYNMIFLPPKEDELCDDCGVSLVQRLDDKEETVRHRLKVYREKTQPVIDYYSKLGILARVDGSQGIPPIVAEVLGILGWSDK

SEQ ID NO: 2171 - DNA, 693 bp, synthetic construct
  misc_feature 1..693: note = variant of adenylate kinase from Thermotoga neapolitana
  source 1..693: mol_type = other DNA
atgcaccatcatcaccatcacgggggctccggcatgggggcatatctggtgttattaggtccgccgggcgcgggaaaaggtacccaaggccgtattatttcggcaaagactggcatcccgcatattagcacgggcgatatcctgcgtgacatcgtcgctaagcaaaacgatgaagttgcctcgagcattaaagagtggatgctgaaaggtgaactcgttccagatgaactgggtaatgcggtagtaaaacgccgcctgtcggagaaagactgcgaaaaaggctttattttggatggtttcccgcgtaccgtgcgccaagcggaatatctggatagttttcttgaaagccagggccgccagttgacagccgccgtgctgattgaggtccccgaagatgaagttgttgcacgtctgctgtctcgccgtatctgtccgaattgcgggcgtagttacaacatgatttttctgccaccaaaagaagacgagctgtgtgacgattgcggtgtcagcttagtacagcgtttagatgataaggaagaaacggtccgtcaccgcctgaaagtctaccgtgagaagacccagccggtcattgactattatagtaagaaaggtattctcgcacgcgtagatgggtcgcaaggaatcccacctatcgtggcagaagtcctggggattctgggttggagcgataag

SEQ ID NO: 2172 - protein, 231 aa, synthetic construct
  REGION 1..231: note = variant of adenylate kinase from Thermotoga neapolitana
MHHHHHHGGSGMGAYLVLLGPPGAGKGTQGRIISAKTGIPHISTGDILRDIVAKQNDEVASSIKEWMLKGELVPDELGNAVVKRRLSEKDCEKGFILDGFPRTVRQAEYLDSFLESQGRQLTAAVLIEVPEDEVVARLLSRRICPNCGRSYNMIFLPPKEDELCDDCGVSLVQRLDDKEETVRHRLKVYREKTQPVIDYYSKKGILARVDGSQGIPPIVAEVLGILGWSDK

SEQ ID NO: 2173 - DNA, 693 bp, synthetic construct
  misc_feature 1..693: note = variant of adenylate kinase from Thermotoga neapolitana
  source 1..693: mol_type = other DNA
atgcaccatcatcaccatcacgggggctccggcatgggggcatatctggtgttattaggtccgccgggcgcgggaaaaggtacccaaggccgtattatttcggcaaaggggggcatcccgcatattagcacgggcgatatcctgcgtgacatcgtcgctaagcaaaacgatgaagttgcctcgagcattaaagagtggatgctgaaaggtgaactcgttccagatgaactgggtaatgcggtagtaaaacgccgcctgtcggagaaagactgcgaaaaaggctttattttggatggtttcccgcgtaccgtgcgccaagcggaatatctggatagttttcttgaaagccagggccgccagttgacagccgccgtgctgattgaggtccccgaagatgaagttgttgcacgtctgctgtctcgccgtatctgtccgaaatgcgggcgtagttacaacatgatttttctgccaccaaaagaagacgagctgtgtgacgattgcggtgtcagcttagtacagcgtttagatgataaggaagaaacggtccgtcaccgcctgaaagtctaccgtgagaagacccagccggtcattgactattatagtaagaaaggtattctcgcacgcgtagatgggtcgcaaggaatcccacctatcgtggcagaagtcctggggattctgggttggagcgataag

SEQ ID NO: 2174 - protein, 231 aa, synthetic construct
  REGION 1..231: note = variant of adenylate kinase from Thermotoga neapolitana
MHHHHHHGGSGMGAYLVLLGPPGAGKGTQGRIISAKGGIPHISTGDILRDIVAKQNDEVASSIKEWMLKGELVPDELGNAVVKRRLSEKDCEKGFILDGFPRTVRQAEYLDSFLESQGRQLTAAVLIEVPEDEVVARLLSRRICPKCGRSYNMIFLPPKEDELCDDCGVSLVQRLDDKEETVRHRLKVYREKTQPVIDYYSKKGILARVDGSQGIPPIVAEVLGILGWSDK

SEQ ID NO: 2175 - DNA, 693 bp, synthetic construct
  misc_feature 1..693: note = variant of adenylate kinase from Thermotoga neapolitana
  source 1..693: mol_type = other DNA
atgcaccatcatcaccatcacgggggctccggcatgggggcatatctggtgttattaggtccgccgggcgcgggaaaaggtacccaaggccgtattatttcggcaaagactggcatcccgcatattagcacgggcgatatcctgcgtgacatcgtcgctaagcaaaacgatgaagttgcctcgagcattaaagagtggatgctgaaaggtgaactcgttccagatgaactgggtaatgcggtagtaaaacgccgcctgtcggagaaagactgcgaaaaaggctttattttggatggtttcccgcgtaccgtgcgccaagcggaatatctggatagttttcttgaaagccagggccgccagttgacagccgccgtgctgattgaggtccccgaagatgaagttgttgcacgtctgctgtctcgccgtatctgtccgaaatgcgggcgtagttacaacatgatttttctgccaccaaaagaagacgagctgtgtgacgattgcggtgtcagcttagtacagcgtttagatgataaggaagaaacggtccgtcaccgcctgaaagtctaccgtgagaagacctatccggtcattgactattatagtaagaaaggtattctcgcacgcgtagatgggtcgcaaggaatcccacctatcgtggcagaagtcctggggattctgggttggagcgataag

SEQ ID NO: 2176 - protein, 231 aa, synthetic construct
  REGION 1..231: note = variant of adenylate kinase from Thermotoga neapolitana
MHHHHHHGGSGMGAYLVLLGPPGAGKGTQGRIISAKTGIPHISTGDILRDIVAKQNDEVASSIKEWMLKGELVPDELGNAVVKRRLSEKDCEKGFILDGFPRTVRQAEYLDSFLESQGRQLTAAVLIEVPEDEVVARLLSRRICPKCGRSYNMIFLPPKEDELCDDCGVSLVQRLDDKEETVRHRLKVYREKTYPVIDYYSKKGILARVDGSQGIPPIVAEVLGILGWSDK

SEQ ID NO: 2177 - DNA, 693 bp, synthetic construct
  misc_feature 1..693: note = variant of adenylate kinase from Thermotoga neapolitana
  source 1..693: mol_type = other DNA
atgcaccatcatcaccatcacgggggctccggcatgggggcatatctggtgttattaggtccgccgggcgcgggaaaaggtacccaaggccgtattatttcggcaaagaggggcatcccgcatattagcacgggcgatatcctgcgtgacatcgtcgctaagcaaaacgatgaagttgcctcgagcattaaagagtggatgctgaaaggtgaactcgttccagatgaactgggtaatgcggtagtaaaacgccgcctgtcggagaaagactgcgaaaaaggctttattttggatggtttcccgcgtaccgtgcgccaagcggaatatctggatagttttcttgaaagccagggccgccagttgacagccgccgtgctgattgaggtccccgaagatgaagttgttgcacgtctgctgtctcgccgtatctgtccgaaatgcgggcgtagttacaacatgatttttctgccaccaaaagaagacgagctgtgtgacgattgcggtgtcagcttagtacagcgtttagatgataaggaagaaacggtccgtcaccgcctgaaagtctaccgtgagaagacccagccggtcattgactattatagtaagaaaggtattctcgcacgcgtagatgggtcgcaaggaatcccacctatcgtggcagaagtcctggggattctgggttggagcgataag

SEQ ID NO: 2178 - protein, 231 aa, synthetic construct
  REGION 1..231: note = variant of adenylate kinase from Thermotoga neapolitana
MHHHHHHGGSGMGAYLVLLGPPGAGKGTQGRIISAKRGIPHISTGDILRDIVAKQNDEVASSIKEWMLKGELVPDELGNAVVKRRLSEKDCEKGFILDGFPRTVRQAEYLDSFLESQGRQLTAAVLIEVPEDEVVARLLSRRICPKCGRSYNMIFLPPKEDELCDDCGVSLVQRLDDKEETVRHRLKVYREKTQPVIDYYSKKGILARVDGSQGIPPIVAEVLGILGWSDK

SEQ ID NO: 2179 - DNA, 693 bp, synthetic construct
  misc_feature 1..693: note = variant of adenylate kinase from Thermotoga neapolitana
  source 1..693: mol_type = other DNA
atgcaccatcatcaccatcacgggggctccggcatgggggcatatctggtgttattaggtccgccgggcgcgggaaaaggtacccaaggccgtattatttcggcaaagactggcatcccgcatattagcacgggcgatatcctgcgtgacatcgtcgctaagcaaaacgatgaagttgcctcgagcattaaagagtggatgctgaaaggtgaactcgttccagatgaactgggtaatgcggtagtaaaacgccgcctgtcggagaaagactgcttgaaaggctttattttggatggtttcccgcgtaccgtgcgccaagcggaatatctggatagttttcttgaaagccagggccgccagttgacagccgccgtgctgattgaggtccccgaagatgaagttgttgcacgtctgctgtctcgccgtatctgtccgaaatgcgggcgtagttacaacatgatttttctgccaccaaaagaagacgagctgtgtgacgattgcggtgtcagcttagtacagcgtttagatgataaggaagaaacggtccgtcaccgcctgaaagtctaccgtgagaagacccagccggtcattgactattatagtaagaaaggtattctcgcacgcgtagatgggtcgcaaggaatcccacctatcgtggcagaagtcctggggattctgggttggagcgataag

SEQ ID NO: 2180 - protein, 231 aa, synthetic construct
  REGION 1..231: note = variant of adenylate kinase from Thermotoga neapolitana
MHHHHHHGGSGMGAYLVLLGPPGAGKGTQGRIISAKTGIPHISTGDILRDIVAKQNDEVASSIKEWMLKGELVPDELGNAVVKRRLSEKDCLKGFILDGFPRTVRQAEYLDSFLESQGRQLTAAVLIEVPEDEVVARLLSRRICPKCGRSYNMIFLPPKEDELCDDCGVSLVQRLDDKEETVRHRLKVYREKTQPVIDYYSKKGILARVDGSQGIPPIVAEVLGILGWSDK

SEQ ID NO: 2181 - DNA, 693 bp, synthetic construct
  misc_feature 1..693: note = variant of adenylate kinase from Thermotoga neapolitana
  source 1..693: mol_type = other DNA
atgcaccatcatcaccatcacgggggctccggcatgggggcatatctggtgttattaggtccgccgggcgcgggaaaaggtacccaaggccgtattatttcggcacgtactggcatcccgcatattagcacgggcgatatcctgcgtgacatcgtcgctaagcaaaacgatgaagttgcctcgagcattaaagagtggatgctgaaaggtgaactcgttccagatgaactgggtaatgcggtagtaaaacgccgcctgtcggagaaagactgcgaaaaaggctttattttggatggtttcccgcgtaccgtgcgccaagcggaatatctggatagttttcttgaaagccagggccgccagttgacagccgccgtgctgattgaggtccccgaagatgaagttgttgcacgtctgctgtctcgccgtatctgtccgaaatgcgggcgtagttacaacatgatttttctgccaccaaaagaagacgagctgtgtgacgattgcggtgtcagcttagtacagcgtttagatgataaggaagaaacggtccgtcaccgcctgaaagtctaccgtgagaagacccagccggtcattgactattatagtaagaaaggtattctcgcacgcgtagatgggtcgcaaggaatcccacctatcgtggcagaagtcctggggattctgggttggagcgataag

SEQ ID NO: 2182 - protein, 231 aa, synthetic construct
  REGION 1..231: note = variant of adenylate kinase from Thermotoga neapolitana
MHHHHHHGGSGMGAYLVLLGPPGAGKGTQGRIISARTGIPHISTGDILRDIVAKQNDEVASSIKEWMLKGELVPDELGNAVVKRRLSEKDCEKGFILDGFPRTVRQAEYLDSFLESQGRQLTAAVLIEVPEDEVVARLLSRRICPKCGRSYNMIFLPPKEDELCDDCGVSLVQRLDDKEETVRHRLKVYREKTQPVIDYYSKKGILARVDGSQGIPPIVAEVLGILGWSDK

SEQ ID NO: 2183 - DNA, 693 bp, synthetic construct
  misc_feature 1..693: note = variant of adenylate kinase from Thermotoga neapolitana
  source 1..693: mol_type = other DNA
atgcaccatcatcaccatcacgggggctccggcatgggggcatatctggtgttattaggtccgccgggcgcgggaaaaggtacccaaggccgtattatttcggcatcgactggcatcccgcatattagcacgggcgatatcctgcgtgacatcgtcgctaagcaaaacgatgaagttgcctcgagcattaaagagtggatgctgaaaggtgaactcgttccagatgaactgggtaatgcggtagtaaaacgccgcctgtcggagaaagactgcgaaaaaggctttattttggatggtttcccgcgtaccgtgcgccaagcggaatatctggatagttttcttgaaagccagggccgccagttgacagccgccgtgctgattgaggtccccgaagatgaagttgttgcacgtctgctgtctcgccgtatctgtccgaaatgcgggcgtagttacaacatgatttttctgccaccaaaagaagacgagctgtgtgacgattgcggtgtcagcttagtacagcgtttagatgataaggaagaaacggtccgtcaccgcctgaaagtctaccgtgagaagacccagccggtcattgactattatagtaagaaaggtattctcgcacgcgtagatgggtcgcaaggaatcccacctatcgtggcagaagtcctggggattctgggttggagcgataag

SEQ ID NO: 2184 - protein, 231 aa, synthetic construct
  REGION 1..231: note = variant of adenylate kinase from Thermotoga neapolitana
MHHHHHHGGSGMGAYLVLLGPPGAGKGTQGRIISASTGIPHISTGDILRDIVAKQNDEVASSIKEWMLKGELVPDELGNAVVKRRLSEKDCEKGFILDGFPRTVRQAEYLDSFLESQGRQLTAAVLIEVPEDEVVARLLSRRICPKCGRSYNMIFLPPKEDELCDDCGVSLVQRLDDKEETVRHRLKVYREKTQPVIDYYSKKGILARVDGSQGIPPIVAEVLGILGWSDK

SEQ ID NO: 2185 - DNA, 693 bp, synthetic construct
  misc_feature 1..693: note = variant of adenylate kinase from Thermotoga neapolitana
  source 1..693: mol_type = other DNA
atgcaccatcatcaccatcacgggggctccggcatgggggcatatctggtgttattaggtccgccgggcgcgggaaaaggtacccaaggccgtattatttcggcaaagactggcatcccgcatattagcacgggcgatatcctgcgtgacatcgtcgctaagcaaaacgatgaagttgcctcgagcattaaagagtggatgctgaaaggtgaactcgttccagatgaactgggtaatgcggtagtaaaacgccgcctgtcggagactgactgcgaaaaaggctttattttggatggtttcccgcgtaccgtgcgccaagcggaatatctggatagttttcttgaaagccagggccgccagttgacagccgccgtgctgattgaggtccccgaagatgaagttgttgcacgtctgctgtctcgccgtatctgtccgaaatgcgggcgtagttacaacatgatttttctgccaccaaaagaagacgagctgtgtgacgattgcggtgtcagcttagtacagcgtttagatgataaggaagaaacggtccgtcaccgcctgaaagtctaccgtgagaagacccagccggtcattgactattatagtaagaaaggtattctcgcacgcgtagatgggtcgcaaggaatcccacctatcgtggcagaagtcctggggattctgggttggagcgataag

SEQ ID NO: 2186 - protein, 231 aa, synthetic construct
  REGION 1..231: note = variant of adenylate kinase from Thermotoga neapolitana
MHHHHHHGGSGMGAYLVLLGPPGAGKGTQGRIISAKTGIPHISTGDILRDIVAKQNDEVASSIKEWMLKGELVPDELGNAVVKRRLSETDCEKGFILDGFPRTVRQAEYLDSFLESQGRQLTAAVLIEVPEDEVVARLLSRRICPKCGRSYNMIFLPPKEDELCDDCGVSLVQRLDDKEETVRHRLKVYREKTQPVIDYYSKKGILARVDGSQGIPPIVAEVLGILGWSDK

SEQ ID NO: 2187 - DNA, 693 bp, synthetic construct
  misc_feature 1..693: note = variant of adenylate kinase from Thermotoga neapolitana
  source 1..693: mol_type = other DNA
atgcaccatcatcaccatcacgggggctccggcatgggggcatatctggtgttattaggtccgccgggcgcgggaaaaggtacccaaggccgtattatttcggcaaagactggcatcccgcatattagcacgggcgatatcctgcgtgacatcgtcgctaagcaaaacgatgaagttgcctcgagcattaaagagtggatgctgaaaggtgaactcgttccagatgaactgggtaatgcggtagtaaaacgccgcctgtcggagaaagactgcgaaaaaggctttattttggatggtttcccgcgtaccgtgcgccaagcggaatatctggatagttttcttgaaagccagggccgccagttgacagccgccgtgctgattgaggtccccgctgatgaagttgttgcacgtctgctgtctcgccgtatctgtccgaaatgcgggcgtagttacaacatgatttttctgccaccaaaagaagacgagctgtgtgacgattgcggtgtcagcttagtacagcgtttagatgataaggaagaaacggtccgtcaccgcctgaaagtctaccgtgagaagacccagccggtcattgactattatagtaagaaaggtattctcgcacgcgtagatgggtcgcaaggaatcccacctatcgtggcagaagtcctggggattctgggttggagcgataag

SEQ ID NO: 2188 - protein, 231 aa, synthetic construct
  REGION 1..231: note = variant of adenylate kinase from Thermotoga neapolitana
MHHHHHHGGSGMGAYLVLLGPPGAGKGTQGRIISAKTGIPHISTGDILRDIVAKQNDEVASSIKEWMLKGELVPDELGNAVVKRRLSEKDCEKGFILDGFPRTVRQAEYLDSFLESQGRQLTAAVLIEVPADEVVARLLSRRICPKCGRSYNMIFLPPKEDELCDDCGVSLVQRLDDKEETVRHRLKVYREKTQPVIDYYSKKGILARVDGSQGIPPIVAEVLGILGWSDK

SEQ ID NO: 2189 - DNA, 693 bp, synthetic construct
  misc_feature 1..693: note = variant of adenylate kinase from Thermotoga neapolitana
  source 1..693: mol_type = other DNA
atgcaccatcatcaccatcacgggggctccggcatgggggcatatctggtgttattaggtccgccgggcgcgggaaaaggtacccaaggccgtattatttcggcaaagactggcatcccgcatattagcacgggcgatatcctgcgtgacatcgtcgctaagcaaaacgatgaagttgcctcgagcattaaagagtggatgctgaaaggtgaactcgttccagatgaactgggtaatgcggtagtaaaacgccgcctgtcggagaaagactgcgaaaaaggctttattttggatggtttcccgcgtaccgtgcgccaagcggaatatctggatagttttcttgaaagccagggccgccagttgacagccgccgtgctgattgaggtccccgaaacggaagttgttgcacgtctgctgtctcgccgtatctgtccgaaatgcgggcgtagttacaacatgatttttctgccaccaaaagaagacgagctgtgtgacgattgcggtgtcagcttagtacagcgtttagatgataaggaagaaacggtccgtcaccgcctgaaagtctaccgtgagaagacccagccggtcattgactattatagtaagaaaggtattctcgcacgcgtagatgggtcgcaaggaatcccacctatcgtggcagaagtcctggggattctgggttggagcgataag

SEQ ID NO: 2190 - protein, 231 aa, synthetic construct
  REGION 1..231: note = variant of adenylate kinase from Thermotoga neapolitana
MHHHHHHGGSGMGAYLVLLGPPGAGKGTQGRIISAKTGIPHISTGDILRDIVAKQNDEVASSIKEWMLKGELVPDELGNAVVKRRLSEKDCEKGFILDGFPRTVRQAEYLDSFLESQGRQLTAAVLIEVPETEVVARLLSRRICPKCGRSYNMIFLPPKEDELCDDCGVSLVQRLDDKEETVRHRLKVYREKTQPVIDYYSKKGILARVDGSQGIPPIVAEVLGILGWSDK

SEQ ID NO: 2191 - DNA, 693 bp, synthetic construct
  misc_feature 1..693: note = variant of adenylate kinase from Thermotoga neapolitana
  source 1..693: mol_type = other DNA
atgcaccatcatcaccatcacgggggctccggcatgggggcatatctggtgttattaggtccgccgggcgcgggaaaaggtacccaaggccgtattatttcggcaaagactggcatcccgcatattagcacgggcgatatcctgcgtgacatcgtcgctaagcaaaacgatgaagttgcctcgagcattaaagagtggatgctgaaaggtgaactcgttccagatgaactgggtaatgcggtagtaaaacgccgcctgtcggagaaattttgcgaaaaaggctttattttggatggtttcccgcgtaccgtgcgccaagcggaatatctggatagttttcttgaaagccagggccgccagttgacagccgccgtgctgattgaggtccccgaagatgaagttgttgcacgtctgctgtctcgccgtatctgtccgaaatgcgggcgtagttacaacatgatttttctgccaccaaaagaagacgagctgtgtgacgattgcggtgtcagcttagtacagcgtttagatgataaggaagaaacggtccgtcaccgcctgaaagtctaccgtgagaagacccagccggtcattgactattatagtaagaaaggtattctcgcacgcgtagatgggtcgcaaggaatcccacctatcgtggcagaagtcctggggattctgggttggagcgataag

SEQ ID NO: 2192 - protein, 231 aa, synthetic construct
  REGION 1..231: note = variant of adenylate kinase from Thermotoga neapolitana
MHHHHHHGGSGMGAYLVLLGPPGAGKGTQGRIISAKTGIPHISTGDILRDIVAKQNDEVASSIKEWMLKGELVPDELGNAVVKRRLSEKFCEKGFILDGFPRTVRQAEYLDSFLESQGRQLTAAVLIEVPEDEVVARLLSRRICPKCGRSYNMIFLPPKEDELCDDCGVSLVQRLDDKEETVRHRLKVYREKTQPVIDYYSKKGILARVDGSQGIPPIVAEVLGILGWSDK

SEQ ID NO: 2193 - DNA, 693 bp, synthetic construct
  misc_feature 1..693: note = variant of adenylate kinase from Thermotoga neapolitana
  source 1..693: mol_type = other DNA
atgcaccatcatcaccatcacgggggctccggcatgggggcatatctggtgttattaggtccgccgggcgcgggaaaaggtacccaaggccgtattatttcggcaaagactggcatcccgcatattagcacgggcgatatcctgcgtgacatcgtcgctaagcaaaacgatgaagttgcctcgagcattaaagagtggatgctgaaaggtgaactcgttccagatgaactgggtaatgcggtagtaaaacgccgcctgtcggagaaagactgcgaaaaaggctttattttggatggtttcccgcgtaccgtgcgccaagcggaatatctggatagttttcttgaaagccagggccgccagttgacagccgccgtgctgattgaggtccccgaagatgaagttgttgcacgtctgctgtctcgccgtatctgtccgaaatgcgggcgtagttacaacatgatttttctgccaccaaaagaagacgagctgtgtgacgattgcggtgtcagcttagtacagcgtttagatgataaggaagaaacggtccgtcaccgcctgaaagtctaccgtgagaagacccagccggtccaggactattatagtaagaaaggtattctcgcacgcgtagatgggtcgcaaggaatcccacctatcgtggcagaagtcctggggattctgggttggagcgataag

SEQ ID NO: 2194 - protein, 231 aa, synthetic construct
  REGION 1..231: note = variant of adenylate kinase from Thermotoga neapolitana
MHHHHHHGGSGMGAYLVLLGPPGAGKGTQGRIISAKTGIPHISTGDILRDIVAKQNDEVASSIKEWMLKGELVPDELGNAVVKRRLSEKDCEKGFILDGFPRTVRQAEYLDSFLESQGRQLTAAVLIEVPEDEVVARLLSRRICPKCGRSYNMIFLPPKEDELCDDCGVSLVQRLDDKEETVRHRLKVYREKTQPVQDYYSKKGILARVDGSQGIPPIVAEVLGILGWSDK

SEQ ID NO: 2195 - DNA, 693 bp, synthetic construct
  misc_feature 1..693: note = variant of adenylate kinase from Thermotoga neapolitana
  source 1..693: mol_type = other DNA
atgcaccatcatcaccatcacgggggctccggcatgggggcatatctggtgttattaggtccgccgggcgcgggaaaaggtacccaaggccgtattatttcggcaaagactggcatcccgcatattagcacgggcgatatcctgcgtgacatcgtcgctaagcaaaacgatgaagttgcctcgagcattaaagagtggatgctgaaaggtgaactcgttccagatgaactgggtaatgcggtagtaaaacgccgcctgtcggagaaagtgtgcgaaaaaggctttattttggatggtttcccgcgtaccgtgcgccaagcggaatatctggatagttttcttgaaagccagggccgccagttgacagccgccgtgctgattgaggtccccgaagatgaagttgttgcacgtctgctgtctcgccgtatctgtccgaaatgcgggcgtagttacaacatgatttttctgccaccaaaagaagacgagctgtgtgacgattgcggtgtcagcttagtacagcgtttagatgataaggaagaaacggtccgtcaccgcctgaaagtctaccgtgagaagacccagccggtcattgactattatagtaagaaaggtattctcgcacgcgtagatgggtcgcaaggaatcccacctatcgtggcagaagtcctggggattctgggttggagcgataag

SEQ ID NO: 2196 - protein, 231 aa, synthetic construct
  REGION 1..231: note = variant of adenylate kinase from Thermotoga neapolitana
MHHHHHHGGSGMGAYLVLLGPPGAGKGTQGRIISAKTGIPHISTGDILRDIVAKQNDEVASSIKEWMLKGELVPDELGNAVVKRRLSEKVCEKGFILDGFPRTVRQAEYLDSFLESQGRQLTAAVLIEVPEDEVVARLLSRRICPKCGRSYNMIFLPPKEDELCDDCGVSLVQRLDDKEETVRHRLKVYREKTQPVIDYYSKKGILARVDGSQGIPPIVAEVLGILGWSDK

SEQ ID NO: 2197 - DNA, 693 bp, synthetic construct
  misc_feature 1..693: note = variant of adenylate kinase from Thermotoga neapolitana
  source 1..693: mol_type = other DNA
atgcaccatcatcaccatcacgggggctccggcatgggggcatatctggtgttattaggtccgccgggcgcgggaaaaggtacccaaggccgtattatttcggcaaagactggcatcccgcatattagcacgggcgatatcctgcgtgacatcgtcgctaagcaaaacgatgaagttgcctcgagcattaaagagtggatgctgaaaggtgaactcgttccagatgaactgggtaatgcggtagtaaaacgccgcctgtcggagaaagactgcgaaaaaggctttattttggatggtttcccgcgtaccgtgcgccaagcggaatatctggatagttttcttgaaagccagggccgccagttgacagccgccgtgctgattgaggtccccgaagatgaagttgttgcacgtctgctgtctcgccgtatctgtccgaaatgctctcgtagttacaacatgatttttctgccaccaaaagaagacgagctgtgtgacgattgcggtgtcagcttagtacagcgtttagatgataaggaagaaacggtccgtcaccgcctgaaagtctaccgtgagaagacccagccggtcattgactattatagtaagaaaggtattctcgcacgcgtagatgggtcgcaaggaatcccacctatcgtggcagaagtcctggggattctgggttggagcgataag

SEQ ID NO: 2198 - protein, 231 aa, synthetic construct
  REGION 1..231: note = variant of adenylate kinase from Thermotoga neapolitana
MHHHHHHGGSGMGAYLVLLGPPGAGKGTQGRIISAKTGIPHISTGDILRDIVAKQNDEVASSIKEWMLKGELVPDELGNAVVKRRLSEKDCEKGFILDGFPRTVRQAEYLDSFLESQGRQLTAAVLIEVPEDEVVARLLSRRICPKCSRSYNMIFLPPKEDELCDDCGVSLVQRLDDKEETVRHRLKVYREKTQPVIDYYSKKGILARVDGSQGIPPIVAEVLGILGWSDK

SEQ ID NO: 2199 - DNA, 693 bp, synthetic construct
  misc_feature 1..693: note = variant of adenylate kinase from Thermotoga neapolitana
  source 1..693: mol_type = other DNA
atgcaccatcatcaccatcacgggggctccggcatgggggcatatctggtgttattaggtccgccgggcgcgggaaaaggtacccaaggccgtattatttcggcaaagactggcatcccgcatattagcacgggcgatatcctgcgtgacatcgtcgctaagcaaaacgatgaagttgcctcgagcattaaagagtggatgctgaaaggtgaactcgttccagatgaactgggtaatgcggtagtaaaacgccgcctgtcggagaaagactcggaaaaaggctttattttggatggtttcccgcgtaccgtgcgccaagcggaatatctggatagttttcttgaaagccagggccgccagttgacagccgccgtgctgattgaggtccccgaagatgaagttgttgcacgtctgctgtctcgccgtatctgtccgaaatgcgggcgtagttacaacatgatttttctgccaccaaaagaagacgagctgtgtgacgattgcggtgtcagcttagtacagcgtttagatgataaggaagaaacggtccgtcaccgcctgaaagtctaccgtgagaagacccagccggtcattgactattatagtaagaaaggtattctcgcacgcgtagatgggtcgcaaggaatcccacctatcgtggcagaagtcctggggattctgggttggagcgataag

SEQ ID NO: 2200 - protein, 231 aa, synthetic construct
  REGION 1..231: note = variant of adenylate kinase from Thermotoga neapolitana
MHHHHHHGGSGMGAYLVLLGPPGAGKGTQGRIISAKTGIPHISTGDILRDIVAKQNDEVASSIKEWMLKGELVPDELGNAVVKRRLSEKDSEKGFILDGFPRTVRQAEYLDSFLESQGRQLTAAVLIEVPEDEVVARLLSRRICPKCGRSYNMIFLPPKEDELCDDCGVSLVQRLDDKEETVRHRLKVYREKTQPVIDYYSKKGILARVDGSQGIPPIVAEVLGILGWSDK

SEQ ID NO: 2201 - DNA, 693 bp, synthetic construct
  misc_feature 1..693: note = variant of adenylate kinase from Thermotoga neapolitana
  source 1..693: mol_type = other DNA
atgcaccatcatcaccatcacgggggctccggcatgggggcatatctggtgttattaggtccgccgggcgcgggaaaaggtacccaaggccgtattatttcggaaaagactggcatcccgcatattagcacgggcgatatcctgcgtgacatcgtcgctaagcaaaacgatgaagttgcctcgagcattaaagagtggatgctgaaaggtgaactcgttccagatgaactgggtaatgcggtagtaaaacgccgcctgtcggagaaagactgcgaaaaaggctttattttggatggtttcccgcgtaccgtgcgccaagcggaatatctggatagttttcttgaaagccagggccgccagttgacagccgccgtgctgattgaggtccccgaagatgaagttgttgcacgtctgctgtctcgccgtatctgtccgaaatgcgggcgtagttacaacatgatttttctgccaccaaaagaagacgagctgtgtgacgattgcggtgtcagcttagtacagcgtttagatgataaggaagaaacggtccgtcaccgcctgaaagtctaccgtgagaagacccagccggtcgtggactattatagtaagaaaggtattctcgcacgcgtagatgggtcgcaaggaatcccacctatcgtggcagaagtcctggggattctgggttggagcgataag

SEQ ID NO: 2202 - protein, 231 aa, synthetic construct
  REGION 1..231: note = variant of adenylate kinase from Thermotoga neapolitana
MHHHHHHGGSGMGAYLVLLGPPGAGKGTQGRIISEKTGIPHISTGDILRDIVAKQNDEVASSIKEWMLKGELVPDELGNAVVKRRLSEKDCEKGFILDGFPRTVRQAEYLDSFLESQGRQLTAAVLIEVPEDEVVARLLSRRICPKCGRSYNMIFLPPKEDELCDDCGVSLVQRLDDKEETVRHRLKVYREKTQPVVDYYSKKGILARVDGSQGIPPIVAEVLGILGWSDK

SEQ ID NO: 2203 - DNA, 693 bp, synthetic construct
  misc_feature 1..693: note = variant of adenylate kinase from Thermotoga neapolitana
  source 1..693: mol_type = other DNA
atgcaccatcatcaccatcacgggggctccggcatgggggcatatctggtgttattaggtccgccgggcgcgggaaaaggtacccaaggccgtattatttcggcaaagactggcatcccgcatattagcacgggcgatatcctgcgtgacatcgtcgctaagcaaaacgatgaagttgcctcgagcattaaagagtggatgctgaaaggtgaactcgttccagatgaactgggtaatgcggtagtaaaacgccgcctgtcggagaaagactgcgaaaaaggctttattttggatggtttcccgcgtaccgtgcgccaagcggaatatctggatagttttcttgaaagccagggccgccagttgacagccgccgtgctgattgaggtccccgaagttgaagttgttgcacgtctgctgtctcgccgtatctgtccgaaatgcgggcgtagttacaacatgatttttctgccaccaaaagaagacgagctgtgtgacgattgcggtgtcagcttagtacagcgtttagatgataaggaagaaacggtccgtcaccgcctgaaagtctaccgtgagaagacccagccggtcattgactattatagtaagaaaggtattctcgcacgcgtagatgggtcgcaaggaatcccacctatcgtggcagaagtcctggggattctgggttggagcgataag

SEQ ID NO: 2204 - protein, 231 aa, synthetic construct
  REGION 1..231: note = variant of adenylate kinase from Thermotoga neapolitana
MHHHHHHGGSGMGAYLVLLGPPGAGKGTQGRIISAKTGIPHISTGDILRDIVAKQNDEVASSIKEWMLKGELVPDELGNAVVKRRLSEKDCEKGFILDGFPRTVRQAEYLDSFLESQGRQLTAAVLIEVPEVEVVARLLSRRICPKCGRSYNMIFLPPKEDELCDDCGVSLVQRLDDKEETVRHRLKVYREKTQPVIDYYSKKGILARVDGSQGIPPIVAEVLGILGWSDK

SEQ ID NO: 2205 - DNA, 693 bp, synthetic construct
  misc_feature 1..693: note = variant of adenylate kinase from Thermotoga neapolitana
  source 1..693: mol_type = other DNA
atgcaccatcatcaccatcacgggggctccggcatgggggcatatctggtgttattaggtccgccgggcgcgggaaaaggtacccaaggccgtattatttcggcaaagactggcatcccgcatattagcacgggcgatatcctgcgtgacatcgtcgctaagcaaaacgatgaagttgcctcgagcattaaagagtggatgctgaaaggtgaactcgttccagatgaactgggtaatgcggtagtaaaacgccgcctgtcggagaaagactgcgaaaaaggctttattttggatggtttcccgcgtaccgtgcgccaagcggaatatctggatagttttcttgaaagccagggccgccagttgacagccgccgtgctgattgaggtccccgaagatgaagttgttgcacgtctgctgtctcgccgtatctgtccgaaatgcgggcgtagttacaacatgatttttctgccaccaaaagaagacgagctgtgtgacgattgcggtgtcagcttagtacagcgtttagatgataaggaagaaacggtccgtcaccgcctgaaagtctaccgtgagaagacccagccggtcgcggactattatagtaagaaaggtattctcgcacgcgtagatgggtcgcaaggaatcccacctatcgtggcagaagtcctggggattctgggttggagcgataag

SEQ ID NO: 2206 - protein, 231 aa, synthetic construct
  REGION 1..231: note = variant of adenylate kinase from Thermotoga neapolitana
MHHHHHHGGSGMGAYLVLLGPPGAGKGTQGRIISAKTGIPHISTGDILRDIVAKQNDEVASSIKEWMLKGELVPDELGNAVVKRRLSEKDCEKGFILDGFPRTVRQAEYLDSFLESQGRQLTAAVLIEVPEDEVVARLLSRRICPKCGRSYNMIFLPPKEDELCDDCGVSLVQRLDDKEETVRHRLKVYREKTQPVADYYSKKGILARVDGSQGIPPIVAEVLGILGWSDK

SEQ ID NO: 2207 - DNA, 693 bp, synthetic construct
  misc_feature 1..693: note = variant of adenylate kinase from Thermotoga neapolitana
  source 1..693: mol_type = other DNA
atgcaccatcatcaccatcacgggggctccggcatgggggcatatctggtgttattaggtccgccgggcgcgggaaaaggtacccaaggccgtattatttcggcaaagactggcatcccgcatattagcacgggcgatatcctgcgtgacatcgtcgctaagcaaaacgatgaagttgcctcgagcattaaagagtggatgctgaaaggtgaactcgttccagatgaactgggtaatgcggtagtaaaacgccgcctgtcggagaaagactgcgaaaaaggctttattttggatggtttcccgcgtaccgtgcgccaagcggaatatctggatagttttcttgaaagccagggccgccagttgacagccgccgtgctgattgaggtccccgaagatgaagttgttgcacgtctgctgtctcgccgtatctgtccgaaatgcgggcgtagttacaacatgatttttctgccaccaaaagaagacgagctgtgtgacgattgcggtgtcagcttagtacagcgtttagatgataaggaagaaacggtccgtcaccgcctgaaagtctaccgtgagaagacccagccggtcgtggactattatagtaagaaaggtattctcgcacgcgtagatgggtcgcaaggaatcccacctatcgtggcagaagtcctggggattctgggttggagcgataag

SEQ ID NO: 2208 - protein, 231 aa, synthetic construct
  REGION 1..231: note = variant of adenylate kinase from Thermotoga neapolitana
MHHHHHHGGSGMGAYLVLLGPPGAGKGTQGRIISAKTGIPHISTGDILRDIVAKQNDEVASSIKEWMLKGELVPDELGNAVVKRRLSEKDCEKGFILDGFPRTVRQAEYLDSFLESQGRQLTAAVLIEVPEDEVVARLLSRRICPKCGRSYNMIFLPPKEDELCDDCGVSLVQRLDDKEETVRHRLKVYREKTQPVVDYYSKKGILARVDGSQGIPPIVAEVLGILGWSDK

SEQ ID NO: 2209 - DNA, 693 bp, synthetic construct
  misc_feature 1..693: note = variant of adenylate kinase from Thermotoga neapolitana
  source 1..693: mol_type = other DNA
atgcaccatcatcaccatcacgggggctccggcatgggggcatatctggtgttattaggtccgccgggcgcgggaaaaggtacccaaggccgtattatttcggcaaagactggcatcccgcatattagcacgggcgatatcctgcgtgacatcgtcgctaagcaaaacgatgaagttgcctcgagcattaaagagtggatgctgaaaggtgaactcgttccagatgaactgggtaatgcggtagtaaaacgccgcctgtcggagaaagactgcgaaccgggctttattttggatggtttcccgcgtaccgtgcgccaagcggaatatctggatagttttcttgaaagccagggccgccagttgacagccgccgtgctgattgaggtccccgaagatgaagttgttgcacgtctgctgtctcgccgtatctgtccgaaatgcgggcgtagttacaacatgatttttctgccaccaaaagaagacgagctgtgtgacgattgcggtgtcagcttagtacagcgtttagatgataaggaagaaacggtccgtcaccgcctgaaagtctaccgtgagaagacccagccggtcattgactattatagtaagaaaggtattctcgcacgcgtagatgggtcgcaaggaatcccacctatcgtggcagaagtcctggggattctgggttggagcgataag

SEQ ID NO: 2210 - protein, 231 aa, synthetic construct
  REGION 1..231: note = variant of adenylate kinase from Thermotoga neapolitana
MHHHHHHGGSGMGAYLVLLGPPGAGKGTQGRIISAKTGIPHISTGDILRDIVAKQNDEVASSIKEWMLKGELVPDELGNAVVKRRLSEKDCEPGFILDGFPRTVRQAEYLDSFLESQGRQLTAAVLIEVPEDEVVARLLSRRICPKCGRSYNMIFLPPKEDELCDDCGVSLVQRLDDKEETVRHRLKVYREKTQPVIDYYSKKGILARVDGSQGIPPIVAEVLGILGWSDK

SEQ ID NO: 2211 - DNA, 693 bp, synthetic construct
  misc_feature 1..693: note = variant of adenylate kinase from Thermotoga neapolitana
  source 1..693: mol_type = other DNA
atgcaccatcatcaccatcacgggggctccggcatgggggcatatctggtgttattaggtccgccgggcgcgggaaaaggtacccaaggccgtattatttcggcaaagactggcatcccgcatattagcacgggcgatatcctgcgtgacatcgtcgctaagcaaaacgatgaagttgcctcgagcattaaagagtggatgctgaaaggtgaactcgttccagatgaactgggtaatgcggtagtaaaacgccgcctgtcggagaaagactgcagtaaaggctttattttggatggtttcccgcgtaccgtgcgccaagcggaatatctggatagttttcttgaaagccagggccgccagttgacagccgccgtgctgattgaggtccccgaagatgaagttgttgcacgtctgctgtctcgccgtatctgtccgaaatgcgggcgtagttacaacatgatttttctgccaccaaaagaagacgagctgtgtgacgattgcggtgtcagcttagtacagcgtttagatgataaggaagaaacggtccgtcaccgcctgaaagtctaccgtgagaagacccagccggtcattgactattatagtaagaaaggtattctcgcacgcgtagatgggtcgcaaggaatcccacctatcgtggcagaagtcctggggattctgggttggagcgataag

SEQ ID NO: 2212 - protein, 231 aa, synthetic construct
  REGION 1..231: note = variant of adenylate kinase from Thermotoga neapolitana
MHHHHHHGGSGMGAYLVLLGPPGAGKGTQGRIISAKTGIPHISTGDILRDIVAKQNDEVASSIKEWMLKGELVPDELGNAVVKRRLSEKDCSKGFILDGFPRTVRQAEYLDSFLESQGRQLTAAVLIEVPEDEVVARLLSRRICPKCGRSYNMIFLPPKEDELCDDCGVSLVQRLDDKEETVRHRLKVYREKTQPVIDYYSKKGILARVDGSQGIPPIVAEVLGILGWSDK

SEQ ID NO: 2213 - DNA, 693 bp, synthetic construct
  misc_feature 1..693: note = variant of adenylate kinase from Thermotoga neapolitana
  source 1..693: mol_type = other DNA
atgcaccatcatcaccatcacgggggctccggcatgggggcatatctggtgttattaggtccgccgggcgcgggaaaaggtacccaaggccgtattatttcggcaatgactggcatcccgcatattagcacgggcgatatcctgcgtgacatcgtcgctaagcaaaacgatgaagttgcctcgagcattaaagagtggatgctgaaaggtgaactcgttccagatgaactgggtaatgcggtagtaaaacgccgcctgtcggagaaagactgcgaaaaaggctttattttggatggtttcccgcgtaccgtgcgccaagcggaatatctggatagttttcttgaaagccagggccgccagttgacagccgccgtgctgattgaggtccccgaagatgaagttgttgcacgtctgctgtctcgccgtatctgtccgaaatgcgggcgtagttacaacatgatttttctgccaccaaaagaagacgagctgtgtgacgattgcggtgtcagcttagtacagcgtttagatgataaggaagaaacggtccgtcaccgcctgaaagtctaccgtgagaagacccagccggtcattgactattatagtaagaaaggtattctcgcacgcgtagatgggtcgcaaggaatcccacctatcgtggcagaagtcctggggattctgggttggagcgataag

SEQ ID NO: 2214 - protein, 231 aa, synthetic construct
  REGION 1..231: note = variant of adenylate kinase from Thermotoga neapolitana
MHHHHHHGGSGMGAYLVLLGPPGAGKGTQGRIISAMTGIPHISTGDILRDIVAKQNDEVASSIKEWMLKGELVPDELGNAVVKRRLSEKDCEKGFILDGFPRTVRQAEYLDSFLESQGRQLTAAVLIEVPEDEVVARLLSRRICPKCGRSYNMIFLPPKEDELCDDCGVSLVQRLDDKEETVRHRLKVYREKTQPVIDYYSKKGILARVDGSQGIPPIVAEVLGILGWSDK

SEQ ID NO: 2215 - DNA, 693 bp, synthetic construct
  misc_feature 1..693: note = variant of adenylate kinase from Thermotoga neapolitana
  source 1..693: mol_type = other DNA
atgcaccatcatcaccatcacgggggctccggcatgggggcatatctggtgttattaggtccgccgggcgcgggaaaaggtacccaaggccgtattatttcggcaaagactggcgcgccgcatattagcacgggcgatatcctgcgtgacatcgtcgctaagcaaaacgatgaagttgcctcgagcattaaagagtggatgctgaaaggtgaactcgttccagatgaactgggtaatgcggtagtaaaacgccgcctgtcggagaaagactgcgaaaaaggctttattttggatggtttcccgcgtaccgtgcgccaagcggaatatctggatagttttcttgaaagccagggccgccagttgacagccgccgtgctgattgaggtccccgaagatgaagttgttgcacgtctgctgtctcgccgtatctgtccgaaatgcgggcgtagttacaacatgatttttctgccaccaaaagaagacgagctgtgtgacgattgcggtgtcagcttagtacagcgtttagatgataaggaagaaacggtccgtcaccgcctgaaagtctaccgtgagaagacccagccggtcattgactattatagtaagaaaggtattctcgcacgcgtagatgggtcgcaaggaatcccacctatcgtggcagaagtcctggggattctgggttggagcgataag

SEQ ID NO: 2216 - protein, 231 aa, synthetic construct
  REGION 1..231: note = variant of adenylate kinase from Thermotoga neapolitana
MHHHHHHGGSGMGAYLVLLGPPGAGKGTQGRIISAKTGAPHISTGDILRDIVAKQNDEVASSIKEWMLKGELVPDELGNAVVKRRLSEKDCEKGFILDGFPRTVRQAEYLDSFLESQGRQLTAAVLIEVPEDEVVARLLSRRICPKCGRSYNMIFLPPKEDELCDDCGVSLVQRLDDKEETVRHRLKVYREKTQPVIDYYSKKGILARVDGSQGIPPIVAEVLGILGWSDK

SEQ ID NO: 2217 - DNA, 693 bp, synthetic construct
  misc_feature 1..693: note = variant of adenylate kinase from Thermotoga neapolitana
  source 1..693: mol_type = other DNA
atgcaccatcatcaccatcacgggggctccggcatgggggcatatctggtgttattaggtccgccgggcgcgggaaaaggtacccaaggccgtattatttcggcaaagactggcatcccgcatattagcacgggcgatatcctgcgtgacatcgtcgctaagcaaaacgatgaagttgcctcgagcattaaagagtggatgctgaaaggtgaactcgttccagatgaactgggtaatgcggtagtaaaacgccgcctgtcggagaaagactgcgaaaaaggctttattttggatggtttcccgcgtaccgtgcgccaagcggaatatctggatagttttcttgaaagccagggccgccagttgacagccgccgtgctgattgaggtccccgaagatgaagttgttgcacgtctgctgtctcgccgtatctgtccgaaatgcgggcgtagttacaacatgatttttctgccaccaaaagaagacgagctgtgtgacgattgcggtgtcagcttagtacagcgtttagatgataaggaagaaacggtccgtcaccgcctgaaagtctaccgtgagaagaccgtgccggtcattgactattatagtaagaaaggtattctcgcacgcgtagatgggtcgcaaggaatcccacctatcgtggcagaagtcctggggattctgggttggagcgataag

SEQ ID NO: 2218 - protein, 231 aa, synthetic construct
  REGION 1..231: note = variant of adenylate kinase from Thermotoga neapolitana
MHHHHHHGGSGMGAYLVLLGPPGAGKGTQGRIISAKTGIPHISTGDILRDIVAKQNDEVASSIKEWMLKGELVPDELGNAVVKRRLSEKDCEKGFILDGFPRTVRQAEYLDSFLESQGRQLTAAVLIEVPEDEVVARLLSRRICPKCGRSYNMIFLPPKEDELCDDCGVSLVQRLDDKEETVRHRLKVYREKTVPVIDYYSKKGILARVDGSQGIPPIVAEVLGILGWSDK

SEQ ID NO: 2219 - DNA, 693 bp, synthetic construct
  misc_feature 1..693: note = variant of adenylate kinase from Thermotoga neapolitana
  source 1..693: mol_type = other DNA
atgcaccatcatcaccatcacgggggctccggcatgggggcatatctggtgttattaggtccgccgggcgcgggaaaaggtacccaaggccgtattatttcggcaaagactggcatcccgcatattagcacgggcgatatcctgcgtgacatcgtcgctaagcaaaacgatgaagttgcctcgagcattaaagagtggatgctgaaaggtgaactcgttccagatgaactgggtaatgcggtagtaaaacgccgcctggttgagaaagactgcgaaaaaggctttattttggatggtttcccgcgtaccgtgcgccaagcggaatatctggatagttttcttgaaagccagggccgccagttgacagccgccgtgctgattgaggtccccgaagatgaagttgttgcacgtctgctgtctcgccgtatctgtccgaaatgcgggcgtagttacaacatgatttttctgccaccaaaagaagacgagctgtgtgacgattgcggtgtcagcttagtacagcgtttagatgataaggaagaaacggtccgtcaccgcctgaaagtctaccgtgagaagacccagccggtcattgactattatagtaagaaaggtattctcgcacgcgtagatgggtcgcaaggaatcccacctatcgtggcagaagtcctggggattctgggttggagcgataag

SEQ ID NO: 2220 - protein, 231 aa, synthetic construct
  REGION 1..231: note = variant of adenylate kinase from Thermotoga neapolitana
MHHHHHHGGSGMGAYLVLLGPPGAGKGTQGRIISAKTGIPHISTGDILRDIVAKQNDEVASSIKEWMLKGELVPDELGNAVVKRRLVEKDCEKGFILDGFPRTVRQAEYLDSFLESQGRQLTAAVLIEVPEDEVVARLLSRRICPKCGRSYNMIFLPPKEDELCDDCGVSLVQRLDDKEETVRHRLKVYREKTQPVIDYYSKKGILARVDGSQGIPPIVAEVLGILGWSDK

SEQ ID NO: 2221 - DNA, 693 bp, synthetic construct
  misc_feature 1..693: note = variant of adenylate kinase from Thermotoga neapolitana
  source 1..693: mol_type = other DNA
atgcaccatcatcaccatcacgggggctccggcatgggggcatatctggtgttattaggtccgccgggcgcgggaaaaggtacccaaggccgtattatttcggcaaagactggcatcccgcatattagcacgggcgatatcctgcgtgacatcgtcgctaagcaaaacgatgaagttgcctcgagcattaaagagtggatgctgaaaggtgaactcgttccagatgaactgggtaatgcggtagtaaaacgccgcctgtcggagaaagactgcgaaaaaggctttattttggatggtttcccgcgtaccgtgcgccaagcggaatatctggatagttttcttgaaagccagggccgccagttgacagccgccgtgctgattgaggtccccgaaggggaagttgttgcacgtctgctgtctcgccgtatctgtccgaaatgcgggcgtagttacaacatgatttttctgccaccaaaagaagacgagctgtgtgacgattgcggtgtcagcttagtacagcgtttagatgataaggaagaaacggtccgtcaccgcctgaaagtctaccgtgagaagacccagccggtcattgactattatagtaagaaaggtattctcgcacgcgtagatgggtcgcaaggaatcccacctatcgtggcagaagtcctggggattctgggttggagcgataag

SEQ ID NO: 2222 - protein, 231 aa, synthetic construct
  REGION 1..231: note = variant of adenylate kinase from Thermotoga neapolitana
MHHHHHHGGSGMGAYLVLLGPPGAGKGTQGRIISAKTGIPHISTGDILRDIVAKQNDEVASSIKEWMLKGELVPDELGNAVVKRRLSEKDCEKGFILDGFPRTVRQAEYLDSFLESQGRQLTAAVLIEVPEGEVVARLLSRRICPKCGRSYNMIFLPPKEDELCDDCGVSLVQRLDDKEETVRHRLKVYREKTQPVIDYYSKKGILARVDGSQGIPPIVAEVLGILGWSDK

SEQ ID NO: 2223 - DNA, 693 bp, synthetic construct
  misc_feature 1..693: note = variant of adenylate kinase from Thermotoga neapolitana
  source 1..693: mol_type = other DNA
atgcaccatcatcaccatcacgggggctccggcatgggggcatatctggtgttattaggtccgccgggcgcgggaaaaggtacccaaggccgtattatttcggcaaagacttttatcccgcatattagcacgggcgatatcctgcgtgacatcgtcgctaagcaaaacgatgaagttgcctcgagcattaaagagtggatgctgaaaggtgaactcgttccagatgaactgggtaatgcggtagtaaaacgccgcctgtcggagaaagactgcgaaaaaggctttattttggatggtttcccgcgtaccgtgcgccaagcggaatatctggatagttttcttgaaagccagggccgccagttgacagccgccgtgctgattgaggtccccgaagatgaagttgttgcacgtctgctgtctcgccgtatctgtccgaaatgcgggcgtagttacaacatgatttttctgccaccaaaagaagacgagctgtgtgacgattgcggtgtcagcttagtacagcgtttagatgataaggaagaaacggtccgtcaccgcctgaaagtctaccgtgagaagacccagccggtcattgactattatagtaagaaaggtattctcgcacgcgtagatgggtcgcaaggaatcccacctatcgtggcagaagtcctggggattctgggttggagcgataag

SEQ ID NO: 2224 - protein, 231 aa, synthetic construct
  REGION 1..231: note = variant of adenylate kinase from Thermotoga neapolitana
MHHHHHHGGSGMGAYLVLLGPPGAGKGTQGRIISAKTFIPHISTGDILRDIVAKQNDEVASSIKEWMLKGELVPDELGNAVVKRRLSEKDCEKGFILDGFPRTVRQAEYLDSFLESQGRQLTAAVLIEVPEDEVVARLLSRRICPKCGRSYNMIFLPPKEDELCDDCGVSLVQRLDDKEETVRHRLKVYREKTQPVIDYYSKKGILARVDGSQGIPPIVAEVLGILGWSDK

SEQ ID NO: 2225 - DNA, 693 bp, synthetic construct
  misc_feature 1..693: note = variant of adenylate kinase from Thermotoga neapolitana
  source 1..693: mol_type = other DNA
atgcaccatcatcaccatcacgggggctccggcatgggggcatatctggtgttattaggtccgccgggcgcgggaaaaggtacccaaggccgtattatttcggcaaagactggcatcccgcatattagcacgggcgatatcctgcgtgacatcgtcgctaagcaaaacgatgaagttgcctcgagcattaaagagtggatgctgaaaggtgaactcgttccagatgaactgggtaatgcggtagtaaaacgccgcctgtcggagaaaacgtgcgaaaaaggctttattttggatggtttcccgcgtaccgtgcgccaagcggaatatctggatagttttcttgaaagccagggccgccagttgacagccgccgtgctgattgaggtccccgaagatgaagttgttgcacgtctgctgtctcgccgtatctgtccgaaatgcgggcgtagttacaacatgatttttctgccaccaaaagaagacgagctgtgtgacgattgcggtgtcagcttagtacagcgtttagatgataaggaagaaacggtccgtcaccgcctgaaagtctaccgtgagaagacccagccggtcattgactattatagtaagaaaggtattctcgcacgcgtagatgggtcgcaaggaatcccacctatcgtggcagaagtcctggggattctgggttggagcgataag

SEQ ID NO: 2226 - protein, 231 aa, synthetic construct
  REGION 1..231: note = variant of adenylate kinase from Thermotoga neapolitana
MHHHHHHGGSGMGAYLVLLGPPGAGKGTQGRIISAKTGIPHISTGDILRDIVAKQNDEVASSIKEWMLKGELVPDELGNAVVKRRLSEKTCEKGFILDGFPRTVRQAEYLDSFLESQGRQLTAAVLIEVPEDEVVARLLSRRICPKCGRSYNMIFLPPKEDELCDDCGVSLVQRLDDKEETVRHRLKVYREKTQPVIDYYSKKGILARVDGSQGIPPIVAEVLGILGWSDK

SEQ ID NO: 2227 - DNA, 693 bp, synthetic construct
  misc_feature 1..693: note = variant of adenylate kinase from Thermotoga neapolitana
  source 1..693: mol_type = other DNA
atgcaccatcatcaccatcacgggggctccggcatgggggcatatctggtgttattaggtccgccgggcgcgggaaaaggtacccaaggccgtattatttcggcaaagactggcatcccgcatattagcacgggcgatatcctgcgtgacatcgtcgctaagcaaaacgatgaagttgcctcgagcattaaagagtggatgctgaaaggtgaactcgttccagatgaactgggtaatgcggtagtaaaacgccgcctgtcggagaaagactgcgaaaaaggctttattttggatggtttcccgcgtaccgtgcgccaagcggaatatctggatagttttcttgaaagccagggccgccagttgacagccgccgtgctgattgaggtccccgaagatgaagttgttgcacgtctgctgtctcgccgtatctgtccgaaatgcgggcgtagttacaacatgatttttctgccaccaaaagaagacgagctgtgtgacgattgcggtgtcagcttagtacagcgtttagatgataaggaagaaacggtccgtcaccgcctgaaagtctaccgtgagaagacccagccggtcattgactattatagtaagaaaggtattctcgcacgcgtagatgggtcgcaaggaatcccacctatcgtggcagaagtcctggggattctgggttggagcgatcgg

SEQ ID NO: 2228 - protein, 231 aa, synthetic construct
  REGION 1..231: note = variant of adenylate kinase from Thermotoga neapolitana
MHHHHHHGGSGMGAYLVLLGPPGAGKGTQGRIISAKTGIPHISTGDILRDIVAKQNDEVASSIKEWMLKGELVPDELGNAVVKRRLSEKDCEKGFILDGFPRTVRQAEYLDSFLESQGRQLTAAVLIEVPEDEVVARLLSRRICPKCGRSYNMIFLPPKEDELCDDCGVSLVQRLDDKEETVRHRLKVYREKTQPVIDYYSKKGILARVDGSQGIPPIVAEVLGILGWSDR

SEQ ID NO: 2229 - DNA, 693 bp, synthetic construct
  misc_feature 1..693: note = variant of adenylate kinase from Thermotoga neapolitana
  source 1..693: mol_type = other DNA
atgcaccatcatcaccatcacgggggctccggcatgggggcatatctggtgttattaggtccgccgggcgcgggaaaaggtacccaaggccgtattatttcggcaaagactggcatcccgcatattagcacgggcgatatcctgcgtgacatcgtcgctaagcaaaacgatgaagttgcctcgagcattaaagagtggatgctgaaaggtgaactcgttccagatgaactgggtaatgcggtagtaaaacgccgcctgtcggagaaagactgcgaaaaaggctttattttggatggtttcccgcgtaccgtgcgccaagcggaatatctggatagttttcttgaaagccagggccgccagttgacagccgccgtgctgattgaggtccccgaagatgaagttgttgcacgtctgctgtctcgccgtatctgtccgaaatgctttcgtagttacaacatgatttttctgccaccaaaagaagacgagctgtgtgacgattgcggtgtcagcttagtacagcgtttagatgataaggaagaaacggtccgtcaccgcctgaaagtctaccgtgagaagacccagccggtcattgactattatagtaagaaaggtattctcgcacgcgtagatgggtcgcaaggaatcccacctatcgtggcagaagtcctggggattctgggttggagcgataag

SEQ ID NO: 2230 - protein, 231 aa, synthetic construct
  REGION 1..231: note = variant of adenylate kinase from Thermotoga neapolitana
MHHHHHHGGSGMGAYLVLLGPPGAGKGTQGRIISAKTGIPHISTGDILRDIVAKQNDEVASSIKEWMLKGELVPDELGNAVVKRRLSEKDCEKGFILDGFPRTVRQAEYLDSFLESQGRQLTAAVLIEVPEDEVVARLLSRRICPKCFRSYNMIFLPPKEDELCDDCGVSLVQRLDDKEETVRHRLKVYREKTQPVIDYYSKKGILARVDGSQGIPPIVAEVLGILGWSDK

SEQ ID NO: 2231 - DNA, 693 bp, synthetic construct
  misc_feature 1..693: note = variant of adenylate kinase from Thermotoga neapolitana
  source 1..693: mol_type = other DNA
atgcaccatcatcaccatcacgggggctccggcatgggggcatatctggtgttattaggtccgccgggcgcgggaaaaggtacccaaggccgtattatttcggcaaagactggcatcccgcatattagcacgggcgatatcctgcgtgacatcgtcgctaagcaaaacgatgaagttgcctcgagcattaaagagtggatgctgaaaggtgaactcgttccagatgaactgggtaatgcggtagtaaaacgccgcctgtcggagaaagacggggaaaaaggctttattttggatggtttcccgcgtaccgtgcgccaagcggaatatctggatagttttcttgaaagccagggccgccagttgacagccgccgtgctgattgaggtccccgaagatgaagttgttgcacgtctgctgtctcgccgtatctgtccgaaatgcgggcgtagttacaacatgatttttctgccaccaaaagaagacgagctgtgtgacgattgcggtgtcagcttagtacagcgtttagatgataaggaagaaacggtccgtcaccgcctgaaagtctaccgtgagaagacccagccggtcattgactattatagtaagaaaggtattctcgcacgcgtagatgggtcgcaaggaatcccacctatcgtggcagaagtcctggggattctgggttggagcgataag

SEQ ID NO: 2232 - protein, 231 aa, synthetic construct
  REGION 1..231: note = variant of adenylate kinase from Thermotoga neapolitana
MHHHHHHGGSGMGAYLVLLGPPGAGKGTQGRIISAKTGIPHISTGDILRDIVAKQNDEVASSIKEWMLKGELVPDELGNAVVKRRLSEKDGEKGFILDGFPRTVRQAEYLDSFLESQGRQLTAAVLIEVPEDEVVARLLSRRICPKCGRSYNMIFLPPKEDELCDDCGVSLVQRLDDKEETVRHRLKVYREKTQPVIDYYSKKGILARVDGSQGIPPIVAEVLGILGWSDK

SEQ ID NO: 2233 - DNA, 693 bp, synthetic construct
  misc_feature 1..693: note = variant of adenylate kinase from Thermotoga neapolitana
  source 1..693: mol_type = other DNA
atgcaccatcatcaccatcacgggggctccggcatgggggcatatctggtgttattaggtccgccgggcgcgggaaaaggtacccaaggccgtattatttcggcaaagactggcatcccgcatattagcacgggcgatatcctgcgtgacatcgtcgctaagcaaaacgatgaagttgcctcgagcattaaagagtggatgctgaaaggtgaactcgttccagatgaactgggtaatgcggtagtaaaacgccgcctgtcggagaaagacgctgaaaaaggctttattttggatggtttcccgcgtaccgtgcgccaagcggaatatctggatagttttcttgaaagccagggccgccagttgacagccgccgtgctgattgaggtccccgaagatgaagttgttgcacgtctgctgtctcgccgtatctgtccgaaatgcgggcgtagttacaacatgatttttctgccaccaaaagaagacgagctgtgtgacgattgcggtgtcagcttagtacagcgtttagatgataaggaagaaacggtccgtcaccgcctgaaagtctaccgtgagaagacccagccggtcattgactattatagtaagaaaggtattctcgcacgcgtagatgggtcgcaaggaatcccacctatcgtggcagaagtcctggggattctgggttggagcgataag

SEQ ID NO: 2234 - protein, 231 aa, synthetic construct
  REGION 1..231: note = variant of adenylate kinase from Thermotoga neapolitana
MHHHHHHGGSGMGAYLVLLGPPGAGKGTQGRIISAKTGIPHISTGDILRDIVAKQNDEVASSIKEWMLKGELVPDELGNAVVKRRLSEKDAEKGFILDGFPRTVRQAEYLDSFLESQGRQLTAAVLIEVPEDEVVARLLSRRICPKCGRSYNMIFLPPKEDELCDDCGVSLVQRLDDKEETVRHRLKVYREKTQPVIDYYSKKGILARVDGSQGIPPIVAEVLGILGWSDK

SEQ ID NO: 2235 - DNA, 693 bp, synthetic construct
  misc_feature 1..693: note = variant of adenylate kinase from Thermotoga neapolitana
  source 1..693: mol_type = other DNA
atgcaccatcatcaccatcacgggggctccggcatgggggcatatctggtgttattaggtccgccgggcgcgggaaaaggtacccaaggccgtattatttcggcaattactggcatcccgcatattagcacgggcgatatcctgcgtgacatcgtcgctaagcaaaacgatgaagttgcctcgagcattaaagagtggatgctgaaaggtgaactcgttccagatgaactgggtaatgcggtagtaaaacgccgcctgtcggagaaagactgcgaaaaaggctttattttggatggtttcccgcgtaccgtgcgccaagcggaatatctggatagttttcttgaaagccagggccgccagttgacagccgccgtgctgattgaggtccccgaagatgaagttgttgcacgtctgctgtctcgccgtatctgtccgaaatgcgggcgtagttacaacatgatttttctgccaccaaaagaagacgagctgtgtgacgattgcggtgtcagcttagtacagcgtttagatgataaggaagaaacggtccgtcaccgcctgaaagtctaccgtgagaagacccagccggtcattgactattatagtaagaaaggtattctcgcacgcgtagatgggtcgcaaggaatcccacctatcgtggcagaagtcctggggattctgggttggagcgataag

SEQ ID NO: 2236 - protein, 231 aa, synthetic construct
  REGION 1..231: note = variant of adenylate kinase from Thermotoga neapolitana
MHHHHHHGGSGMGAYLVLLGPPGAGKGTQGRIISAITGIPHISTGDILRDIVAKQNDEVASSIKEWMLKGELVPDELGNAVVKRRLSEKDCEKGFILDGFPRTVRQAEYLDSFLESQGRQLTAAVLIEVPEDEVVARLLSRRICPKCGRSYNMIFLPPKEDELCDDCGVSLVQRLDDKEETVRHRLKVYREKTQPVIDYYSKKGILARVDGSQGIPPIVAEVLGILGWSDK

SEQ ID NO: 2237 - DNA, 693 bp, synthetic construct
  misc_feature 1..693: note = variant of adenylate kinase from Thermotoga neapolitana
  source 1..693: mol_type = other DNA
atgcaccatcatcaccatcacgggggctccggcatgggggcatatctggtgttattaggtccgccgggcgcgggaaaaggtacccaaggccgtattatttcggcaaagactggcatcccgcatattagcacgggcgatatcctgcgtgacatcgtcgctaagcaaaacgatgaagttgcctcgagcattaaagagtggatgctgaaaggtgaactcgttccagatgaactgggtaatgcggtagtaaaacgccgcctggaggagaaagactgcgaaaaaggctttattttggatggtttcccgcgtaccgtgcgccaagcggaatatctggatagttttcttgaaagccagggccgccagttgacagccgccgtgctgattgaggtccccgaagatgaagttgttgcacgtctgctgtctcgccgtatctgtccgaaatgcgggcgtagttacaacatgatttttctgccaccaaaagaagacgagctgtgtgacgattgcggtgtcagcttagtacagcgtttagatgataaggaagaaacggtccgtcaccgcctgaaagtctaccgtgagaagacccagccggtcattgactattatagtaagaaaggtattctcgcacgcgtagatgggtcgcaaggaatcccacctatcgtggcagaagtcctggggattctgggttggagcgataag

SEQ ID NO: 2238 - protein, 231 aa, synthetic construct
  REGION 1..231: note = variant of adenylate kinase from Thermotoga neapolitana
MHHHHHHGGSGMGAYLVLLGPPGAGKGTQGRIISAKTGIPHISTGDILRDIVAKQNDEVASSIKEWMLKGELVPDELGNAVVKRRLEEKDCEKGFILDGFPRTVRQAEYLDSFLESQGRQLTAAVLIEVPEDEVVARLLSRRICPKCGRSYNMIFLPPKEDELCDDCGVSLVQRLDDKEETVRHRLKVYREKTQPVIDYYSKKGILARVDGSQGIPPIVAEVLGILGWSDK

SEQ ID NO: 2239 - DNA, 693 bp, synthetic construct
  misc_feature 1..693: note = variant of adenylate kinase from Thermotoga neapolitana
  source 1..693: mol_type = other DNA
atgcaccatcatcaccatcacgggggctccggcatgggggcatatctggtgttattaggtccgccgggcgcgggaaaaggtacccaaggccgtattatttcggcaaagctgggcatcccgcatattagcacgggcgatatcctgcgtgacatcgtcgctaagcaaaacgatgaagttgcctcgagcattaaagagtggatgctgaaaggtgaactcgttccagatgaactgggtaatgcggtagtaaaacgccgcctgtcggagaaagactgcgaaaaaggctttattttggatggtttcccgcgtaccgtgcgccaagcggaatatctggatagttttcttgaaagccagggccgccagttgacagccgccgtgctgattgaggtccccgaagatgaagttgttgcacgtctgctgtctcgccgtatctgtccgaaatgcgggcgtagttacaacatgatttttctgccaccaaaagaagacgagctgtgtgacgattgcggtgtcagcttagtacagcgtttagatgataaggaagaaacggtccgtcaccgcctgaaagtctaccgtgagaagacccagccggtcattgactattatagtaagaaaggtattctcgcacgcgtagatgggtcgcaaggaatcccacctatcgtggcagaagtcctggggattctgggttggagcgataag

SEQ ID NO: 2240 - protein, 231 aa, synthetic construct
  REGION 1..231: note = variant of adenylate kinase from Thermotoga neapolitana
MHHHHHHGGSGMGAYLVLLGPPGAGKGTQGRIISAKLGIPHISTGDILRDIVAKQNDEVASSIKEWMLKGELVPDELGNAVVKRRLSEKDCEKGFILDGFPRTVRQAEYLDSFLESQGRQLTAAVLIEVPEDEVVARLLSRRICPKCGRSYNMIFLPPKEDELCDDCGVSLVQRLDDKEETVRHRLKVYREKTQPVIDYYSKKGILARVDGSQGIPPIVAEVLGILGWSDK

SEQ ID NO: 2241 - DNA, 693 bp, synthetic construct
  misc_feature 1..693: note = variant of adenylate kinase from Thermotoga neapolitana
  source 1..693: mol_type = other DNA
atgcaccatcatcaccatcacgggggctccggcatgggggcatatctggtgttattaggtccgccgggcgcgggaaaaggtacccaaggccgtattatttcggcaaagactggcatcccgcatattagcacgggcgatatcctgcgtgacatcgtcgctaagcaaaacgatgaagttgcctcgagcattaaagagtggatgctgaaaggtgaactcgttccagatgaactgggtaatgcggtagtaaaacgccgcctgtcggagaaagactgcgaaaaaggctttattttggatggtttcccgcgtaccgtgcgccaagcggaatatctggatagttttcttgaaagccagggccgccagttgacagccgccgtgctgattgaggtccccgaagatgaagttgttgcacgtctgctgtctcgccgtatctgtccgaaatgcgggcgtagttacaacatgatttttctgccaccaaaagaagacgagctgtgtgacgattgcggtgtcagcttagtacagcgtttagatgataaggaagaaacggtccgtcaccgcctgaaagtctaccgtgagaagacccagccggtcattgactattatagtaagaaaggtattctcgcacgcgtagatgggtcgcaaggaatcccacctatcgtggcagaagtcctggggattctgggttggagcgatact

SEQ ID NO: 2242 - protein, 231 aa, synthetic construct
  REGION 1..231: note = variant of adenylate kinase from Thermotoga neapolitana
MHHHHHHGGSGMGAYLVLLGPPGAGKGTQGRIISAKTGIPHISTGDILRDIVAKQNDEVASSIKEWMLKGELVPDELGNAVVKRRLSEKDCEKGFILDGFPRTVRQAEYLDSFLESQGRQLTAAVLIEVPEDEVVARLLSRRICPKCGRSYNMIFLPPKEDELCDDCGVSLVQRLDDKEETVRHRLKVYREKTQPVIDYYSKKGILARVDGSQGIPPIVAEVLGILGWSDT

SEQ ID NO: 2243 - DNA, 693 bp, synthetic construct
  misc_feature 1..693: note = variant of adenylate kinase from Thermotoga neapolitana
  source 1..693: mol_type = other DNA
atgcaccatcatcaccatcacgggggctccggcatgggggcatatctggtgttattaggtccgccgggcgcgggaaaaggtacccaaggccgtattatttcggcaaagactggcatcccgcatattagcacgggcgatatcctgcgtgacatcgtcgctaagcaaaacgatgaagttgcctcgagcattaaagagtggatgctgaaaggtgaactcgttccagatgaactgggtaatgcggtagtaaaacgccgcctgtcggagaaagactgcgaaaaaggctttattttggatggtttcccgcgtaccgtgcgccaagcggaatatctggatagttttcttgaaagccagggccgccagttgacagccgccgtgctgattgaggtccccgaagatgaagttgttgcacgtctgctgtctcgccgtatctgtccgaaatgcgggcgtagttacaacatgatttttctgccaccaaaagaagacgagctgtgtgacgattgcggtgtcagcttagtacagcgtttagatgataaggaagaaacggtccgtcaccgcctgaaagtctaccgtgagaagacccagccggtcattgactattatagtaagaaaggtattctcgcacgcgtagatgggtcgcaaggaatcccacctatcgtggcagaagtcctggggattctgggttggagcgatgcg

SEQ ID NO: 2244 - protein, 231 aa, synthetic construct
  REGION 1..231: note = variant of adenylate kinase from Thermotoga neapolitana
MHHHHHHGGSGMGAYLVLLGPPGAGKGTQGRIISAKTGIPHISTGDILRDIVAKQNDEVASSIKEWMLKGELVPDELGNAVVKRRLSEKDCEKGFILDGFPRTVRQAEYLDSFLESQGRQLTAAVLIEVPEDEVVARLLSRRICPKCGRSYNMIFLPPKEDELCDDCGVSLVQRLDDKEETVRHRLKVYREKTQPVIDYYSKKGILARVDGSQGIPPIVAEVLGILGWSDA

SEQ ID NO: 2245 - DNA, 693 bp, synthetic construct
  misc_feature 1..693: note = variant of adenylate kinase from Thermotoga neapolitana
  source 1..693: mol_type = other DNA
atgcaccatcatcaccatcacgggggctccggcatgggggcatatctggtgttattaggtccgccgggcgcgggaaaaggtacccaaggccgtattatttcggcaaagactggcatcccgcatattagcacgggcgatatcctgcgtgacatcgtcgctaagcaaaacgatgaagttgcctcgagcattaaagagtggatgctgaaaggtgaactcgttccagatgaactgggtaatgcggtagtaaaacgccgcctgtcggagccggactgcgaaaaaggctttattttggatggtttcccgcgtaccgtgcgccaagcggaatatctggatagttttcttgaaagccagggccgccagttgacagccgccgtgctgattgaggtccccgaagatgaagttgttgcacgtctgctgtctcgccgtatctgtccgaaatgcgggcgtagttacaacatgatttttctgccaccaaaagaagacgagctgtgtgacgattgcggtgtcagcttagtacagcgtttagatgataaggaagaaacggtccgtcaccgcctgaaagtctaccgtgagaagacccagccggtcattgactattatagtaagaaaggtattctcgcacgcgtagatgggtcgcaaggaatcccacctatcgtggcagaagtcctggggattctgggttggagcgataag

SEQ ID NO: 2246 - protein, 231 aa, synthetic construct
  REGION 1..231: note = variant of adenylate kinase from Thermotoga neapolitana
MHHHHHHGGSGMGAYLVLLGPPGAGKGTQGRIISAKTGIPHISTGDILRDIVAKQNDEVASSIKEWMLKGELVPDELGNAVVKRRLSEPDCEKGFILDGFPRTVRQAEYLDSFLESQGRQLTAAVLIEVPEDEVVARLLSRRICPKCGRSYNMIFLPPKEDELCDDCGVSLVQRLDDKEETVRHRLKVYREKTQPVIDYYSKKGILARVDGSQGIPPIVAEVLGILGWSDK

SEQ ID NO: 2247 - DNA, 693 bp, synthetic construct
  misc_feature 1..693: note = variant of adenylate kinase from Thermotoga neapolitana
  source 1..693: mol_type = other DNA
atgcaccatcatcaccatcacgggggctccggcatgggggcatatctggtgttattaggtccgccgggcgcgggaaaaggtacccaaggccgtattatttcggcaaagactggcatcccgcatattagcacgggcgatatcctgcgtgacatcgtcgctaagcaaaacgatgaagttgcctcgagcattaaagagtggatgctgaaaggtgaactcgttccagatgaactgggtaatgcggtagtaaaacgccgcctgtcggagaaagactgcgaaaaaggctttattttggatggtttcccgcgtaccgtgcgccaagcggaatatctggatagttttcttgaaagccagggccgccagttgacagccgccgtgctgattgaggtccccgaagatgaagttgttgcacgtctgctgtctcgccgtatctgtccgaaatgcgggcgtagttacaacatgatttttctgccaccaaaagaagacgagctgtgtgacgattgcggtgtcagcttagtacagcgtttagatgataaggaagaaacggtccgtcaccgcctgaaagtctaccgtgagaagacccagccggtcattgactattatagtagtaaaggtattctcgcacgcgtagatgggtcgcaaggaatcccacctatcgtggcagaagtcctggggattctgggttggagcgataag

SEQ ID NO: 2248 - protein, 231 aa, synthetic construct
  REGION 1..231: note = variant of adenylate kinase from Thermotoga neapolitana
MHHHHHHGGSGMGAYLVLLGPPGAGKGTQGRIISAKTGIPHISTGDILRDIVAKQNDEVASSIKEWMLKGELVPDELGNAVVKRRLSEKDCEKGFILDGFPRTVRQAEYLDSFLESQGRQLTAAVLIEVPEDEVVARLLSRRICPKCGRSYNMIFLPPKEDELCDDCGVSLVQRLDDKEETVRHRLKVYREKTQPVIDYYSSKGILARVDGSQGIPPIVAEVLGILGWSDK

SEQ ID NO: 2249 - DNA, 693 bp, synthetic construct
  misc_feature 1..693: note = variant of adenylate kinase from Thermotoga neapolitana
  source 1..693: mol_type = other DNA
atgcaccatcatcaccatcacgggggctccggcatgggggcatatctggtgttattaggtccgccgggcgcgggaaaaggtacccaaggccgtattatttcggcagagactggcatcccgcatattagcacgggcgatatcctgcgtgacatcgtcgctaagcaaaacgatgaagttgcctcgagcattaaagagtggatgctgaaaggtgaactcgttccagatgaactgggtaatgcggtagtaaaacgccgcctgtcggagaaagactgcgaaaaaggctttattttggatggtttcccgcgtaccgtgcgccaagcggaatatctggatagttttcttgaaagccagggccgccagttgacagccgccgtgctgattgaggtccccgaagatgaagttgttgcacgtctgctgtctcgccgtatctgtccgaaatgcgggcgtagttacaacatgatttttctgccaccaaaagaagacgagctgtgtgacgattgcggtgtcagcttagtacagcgtttagatgataaggaagaaacggtccgtcaccgcctgaaagtctaccgtgagaagacccagccggtcattgactattatagtaagaaaggtattctcgcacgcgtagatgggtcgcaaggaatcccacctatcgtggcagaagtcctggggattctgggttggagcgataag

SEQ ID NO: 2250 - protein, 231 aa, synthetic construct
  REGION 1..231: note = variant of adenylate kinase from Thermotoga neapolitana
MHHHHHHGGSGMGAYLVLLGPPGAGKGTQGRIISAETGIPHISTGDILRDIVAKQNDEVASSIKEWMLKGELVPDELGNAVVKRRLSEKDCEKGFILDGFPRTVRQAEYLDSFLESQGRQLTAAVLIEVPEDEVVARLLSRRICPKCGRSYNMIFLPPKEDELCDDCGVSLVQRLDDKEETVRHRLKVYREKTQPVIDYYSKKGILARVDGSQGIPPIVAEVLGILGWSDK

SEQ ID NO: 2251 - DNA, 693 bp, synthetic construct
  misc_feature 1..693: note = variant of adenylate kinase from Thermotoga neapolitana
  source 1..693: mol_type = other DNA
atgcaccatcatcaccatcacgggggctccggcatgggggcatatctggtgttattaggtccgccgggcgcgggaaaaggtacccaaggccgtattatttcggcaaagactggcatcccgcatattagcacgggcgatatcctgcgtgacatcgtcgctaagcaaaacgatgaagttgcctcgagcattaaagagtggatgctgaaaggtgaactcgttccagatgaactgggtaatgcggtagtaaaacgccgcctgtcggagaaagactgcgaaaaaggctttattttggatggtttcccgcgtaccgtgcgccaagcggaatatctggatagttttcttgaaagccagggccgccagttgacagccgccgtgctgattgaggtccccgaagatgaagttgttgcacgtctgctgtctcgccgtatctgtccgaaatgcgggcgtagttacaacatgatttttctgccaccaaaagaagacgagctgtgtgacgattgcggtgtcagcttagtacagcgtttagatgataaggaagaaacggtccgtcaccgcctgaaagtctaccgtgagaagacccagccggtcattgactattatagtaagaaaggtattctcgcacgcgtagatgggtcgcaaggaatcccacctatcgtggcagaagtcctggggattctgggttggagcgatcag

SEQ ID NO: 2252 - protein, 231 aa, synthetic construct
  REGION 1..231: note = variant of adenylate kinase from Thermotoga neapolitana
MHHHHHHGGSGMGAYLVLLGPPGAGKGTQGRIISAKTGIPHISTGDILRDIVAKQNDEVASSIKEWMLKGELVPDELGNAVVKRRLSEKDCEKGFILDGFPRTVRQAEYLDSFLESQGRQLTAAVLIEVPEDEVVARLLSRRICPKCGRSYNMIFLPPKEDELCDDCGVSLVQRLDDKEETVRHRLKVYREKTQPVIDYYSKKGILARVDGSQGIPPIVAEVLGILGWSDQ

SEQ ID NO: 2253 - DNA, 693 bp, synthetic construct
  misc_feature 1..693: note = variant of adenylate kinase from Thermotoga neapolitana
  source 1..693: mol_type = other DNA
atgcaccatcatcaccatcacgggggctccggcatgggggcatatctggtgttattaggtccgccgggcgcgggaaaaggtacccaaggccgtattatttcggcaaagactggcatcccgcatattagcacgggcgatatcctgcgtgacatcgtcgctaagcaaaacgatgaagttgcctcgagcattaaagagtggatgctgaaaggtgaactcgttccagatgaactgggtaatgcggtagtaaaacgccgcctggctgagaaagactgcgaaaaaggctttattttggatggtttcccgcgtaccgtgcgccaagcggaatatctggatagttttcttgaaagccagggccgccagttgacagccgccgtgctgattgaggtccccgaagatgaagttgttgcacgtctgctgtctcgccgtatctgtccgaaatgcgggcgtagttacaacatgatttttctgccaccaaaagaagacgagctgtgtgacgattgcggtgtcagcttagtacagcgtttagatgataaggaagaaacggtccgtcaccgcctgaaagtctaccgtgagaagacccagccggtcattgactattatagtaagaaaggtattctcgcacgcgtagatgggtcgcaaggaatcccacctatcgtggcagaagtcctggggattctgggttggagcgataag

SEQ ID NO: 2254 - protein, 231 aa, synthetic construct
  REGION 1..231: note = variant of adenylate kinase from Thermotoga neapolitana
MHHHHHHGGSGMGAYLVLLGPPGAGKGTQGRIISAKTGIPHISTGDILRDIVAKQNDEVASSIKEWMLKGELVPDELGNAVVKRRLAEKDCEKGFILDGFPRTVRQAEYLDSFLESQGRQLTAAVLIEVPEDEVVARLLSRRICPKCGRSYNMIFLPPKEDELCDDCGVSLVQRLDDKEETVRHRLKVYREKTQPVIDYYSKKGILARVDGSQGIPPIVAEVLGILGWSDK

SEQ ID NO: 2255 - DNA, 693 bp, synthetic construct
  misc_feature 1..693: note = variant of adenylate kinase from Thermotoga neapolitana
  source 1..693: mol_type = other DNA
atgcaccatcatcaccatcacgggggctccggcatgggggcatatctggtgttattaggtccgccgggcgcgggaaaaggtacccaaggccgtattatttcggcaaagactggcatcccgcatattagcacgggcgatatcctgcgtgacatcgtcgctaagcaaaacgatgaagttgcctcgagcattaaagagtggatgctgaaaggtgaactcgttccagatgaactgggtaatgcggtagtaaaacgccgcctgtcggagaaagactgcgaaaaaggctttattttggatggtttcccgcgtaccgtgcgccaagcggaatatctggatagttttcttgaaagccagggccgccagttgacagccgccgtgctgattgaggtccccgaagatgaagttgttgcacgtctgctgtctcgccgtatctgtccggtgtgcgggcgtagttacaacatgatttttctgccaccaaaagaagacgagctgtgtgacgattgcggtgtcagcttagtacagcgtttagatgataaggaagaaacggtccgtcaccgcctgaaagtctaccgtgagaagacccagccggtcattgactattatagtaagaaaggtattctcgcacgcgtagatgggtcgcaaggaatcccacctatcgtggcagaagtcctggggattctgggttggagcgataag

SEQ ID NO: 2256 - protein, 231 aa, synthetic construct
  REGION 1..231: note = variant of adenylate kinase from Thermotoga neapolitana
MHHHHHHGGSGMGAYLVLLGPPGAGKGTQGRIISAKTGIPHISTGDILRDIVAKQNDEVASSIKEWMLKGELVPDELGNAVVKRRLSEKDCEKGFILDGFPRTVRQAEYLDSFLESQGRQLTAAVLIEVPEDEVVARLLSRRICPVCGRSYNMIFLPPKEDELCDDCGVSLVQRLDDKEETVRHRLKVYREKTQPVIDYYSKKGILARVDGSQGIPPIVAEVLGILGWSDK

SEQ ID NO: 2257 - DNA, 693 bp, synthetic construct
  misc_feature 1..693: note = variant of adenylate kinase from Thermotoga neapolitana
  source 1..693: mol_type = other DNA
atgcaccatcatcaccatcacgggggctccggcatgggggcatatctggtgttattaggtccgccgggcgcgggaaaaggtacccaaggccgtattatttcggcaaagactggcatcccgcatattagcacgggcgatatcctgcgtgacatcgtcgctaagcaaaacgatgaagttgcctcgagcattaaagagtggatgctgaaaggtgaactcgttccagatgaactgggtaatgcggtagtaaaacgccgcctgtcggagaaagactgcgaaaaaggctttattttggatggtttcccgcgtaccgtgcgccaagcggaatatctggatagttttcttgaaagccagggccgccagttgacagccgccgtgctgattgaggtccccgaagatgaagttgttgcacgtctgctgtctcgccgtatctgtccgcggtgcgggcgtagttacaacatgatttttctgccaccaaaagaagacgagctgtgtgacgattgcggtgtcagcttagtacagcgtttagatgataaggaagaaacggtccgtcaccgcctgaaagtctaccgtgagaagacccagccggtcattgactattatagtaagaaaggtattctcgcacgcgtagatgggtcgcaaggaatcccacctatcgtggcagaagtcctggggattctgggttggagcgataag

SEQ ID NO: 2258 - protein, 231 aa, synthetic construct
  REGION 1..231: note = variant of adenylate kinase from Thermotoga neapolitana
MHHHHHHGGSGMGAYLVLLGPPGAGKGTQGRIISAKTGIPHISTGDILRDIVAKQNDEVASSIKEWMLKGELVPDELGNAVVKRRLSEKDCEKGFILDGFPRTVRQAEYLDSFLESQGRQLTAAVLIEVPEDEVVARLLSRRICPRCGRSYNMIFLPPKEDELCDDCGVSLVQRLDDKEETVRHRLKVYREKTQPVIDYYSKKGILARVDGSQGIPPIVAEVLGILGWSDK

SEQ ID NO: 2259 - DNA, 693 bp, synthetic construct
  misc_feature 1..693: note = variant of adenylate kinase from Thermotoga neapolitana
  source 1..693: mol_type = other DNA
atgcaccatcatcaccatcacgggggctccggcatgggggcatatctggtgttattaggtccgccgggcgcgggaaaaggtacccaaggccgtattatttcggcaaagactggcatcccgcatattagcacgggcgatatcctgcgtgacatcgtcgctaagcaaacggatgaagttgcctcgagcattaaagagtggatgctgaaaggtgaactcgttccagatgaactgggtaatgcggtagtaaaacgccgcctgtcggagaaagactgcgaaaaaggctttattttggatggtttcccgcgtaccgtgcgccaagcggaatatctggatagttttcttgaaagccagggccgccagttgacagccgccgtgctgattgaggtccccgaagatgaagttgttgcacgtctgctgtctcgccgtatctgtccgaaatgcgggcgtagttacaacatgatttttctgccaccaaaagaagacgagctgtgtgacgattgcggtgtcagcttagtacagcgtttagatgataaggaagaaacggtccgtcaccgcctgaaagtctaccgtgagaagacccagccggtcattgactattatagtaagaaaggtattctcgcacgcgtagatgggtcgcaaggaatcccacctatcgtggcagaagtcctggggattctgggttggagcgataag

SEQ ID NO: 2260 - protein, 231 aa, synthetic construct
  REGION 1..231: note = variant of adenylate kinase from Thermotoga neapolitana
MHHHHHHGGSGMGAYLVLLGPPGAGKGTQGRIISAKTGIPHISTGDILRDIVAKQTDEVASSIKEWMLKGELVPDELGNAVVKRRLSEKDCEKGFILDGFPRTVRQAEYLDSFLESQGRQLTAAVLIEVPEDEVVARLLSRRICPKCGRSYNMIFLPPKEDELCDDCGVSLVQRLDDKEETVRHRLKVYREKTQPVIDYYSKKGILARVDGSQGIPPIVAEVLGILGWSDK

SEQ ID NO: 2261 - DNA, 693 bp, synthetic construct
  misc_feature 1..693: note = variant of adenylate kinase from Thermotoga neapolitana
  source 1..693: mol_type = other DNA
atgcaccatcatcaccatcacgggggctccggcatgggggcatatctggtgttattaggtccgccgggcgcgggaaaaggtacccaaggccgtattatttcggcaaagactggcatcccgcatattagcacgggcgatatcctgcgtgacatcgtcgctaagcaaaacgatgaagttgcctcgagcattaaagagtggatgctgaaaggtgaactcgttccagatgaactgggtaatgcggtagtaaaacgccgcctgtcggagaaagactgcgaagcgggctttattttggatggtttcccgcgtaccgtgcgccaagcggaatatctggatagttttcttgaaagccagggccgccagttgacagccgccgtgctgattgaggtccccgaagatgaagttgttgcacgtctgctgtctcgccgtatctgtccgaaatgcgggcgtagttacaacatgatttttctgccaccaaaagaagacgagctgtgtgacgattgcggtgtcagcttagtacagcgtttagatgataaggaagaaacggtccgtcaccgcctgaaagtctaccgtgagaagacccagccggtcattgactattatagtaagaaaggtattctcgcacgcgtagatgggtcgcaaggaatcccacctatcgtggcagaagtcctggggattctgggttggagcgataag

SEQ ID NO: 2262 - protein, 231 aa, synthetic construct
  REGION 1..231: note = variant of adenylate kinase from Thermotoga neapolitana
MHHHHHHGGSGMGAYLVLLGPPGAGKGTQGRIISAKTGIPHISTGDILRDIVAKQNDEVASSIKEWMLKGELVPDELGNAVVKRRLSEKDCEAGFILDGFPRTVRQAEYLDSFLESQGRQLTAAVLIEVPEDEVVARLLSRRICPKCGRSYNMIFLPPKEDELCDDCGVSLVQRLDDKEETVRHRLKVYREKTQPVIDYYSKKGILARVDGSQGIPPIVAEVLGILGWSDK

SEQ ID NO: 2263 - DNA, 693 bp, synthetic construct
  misc_feature 1..693: note = variant of adenylate kinase from Thermotoga neapolitana
  source 1..693: mol_type = other DNA
atgcaccatcatcaccatcacgggggctccggcatgggggcatatctggtgttattaggtccgccgggcgcgggaaaaggtacccaaggccgtattatttcggcaaagactggcatcccgcatattagcacgggcgatatcctgcgtgacatcgtcgctaagcaaaacgatgaagttgcctcgagcattaaagagtggatgctgaaaggtgaactcgttccagatgaactgggtaatgcggtagtaaaacgccgcctgtcggagaaagactgcgaaaaaggctttattttggatggtttcccgcgtaccgtgcgccaagcggaatatctggatagttttcttgaaagccagggccgccagttgacagccgccgtgctgattgaggtccccgaagatgaagttgttgcacgtctgctgtctcgccgtatctgtccgaaatgcgggcgtagttacaacatgatttttctgccaccaaaagaagacgagctgtgtgacgattgcggtgtcagcttagtacagcgtttagatgataaggaagaaacggtccgtcaccgcctgaaagtctaccgtgagaagacccagccggtcattgactattatagtaagaggggtattctcgcacgcgtagatgggtcgcaaggaatcccacctatcgtggcagaagtcctggggattctgggttggagcgataag

SEQ ID NO: 2264 - protein, 231 aa, synthetic construct
  REGION 1..231: note = variant of adenylate kinase from Thermotoga neapolitana
MHHHHHHGGSGMGAYLVLLGPPGAGKGTQGRIISAKTGIPHISTGDILRDIVAKQNDEVASSIKEWMLKGELVPDELGNAVVKRRLSEKDCEKGFILDGFPRTVRQAEYLDSFLESQGRQLTAAVLIEVPEDEVVARLLSRRICPKCGRSYNMIFLPPKEDELCDDCGVSLVQRLDDKEETVRHRLKVYREKTQPVIDYYSKRGILARVDGSQGIPPIVAEVLGILGWSDK

SEQ ID NO: 2265 - DNA, 693 bp, synthetic construct
  misc_feature 1..693: note = variant of adenylate kinase from Thermotoga neapolitana
  source 1..693: mol_type = other DNA
atgcaccatcatcaccatcacgggggctccggcatgggggcatatctggtgttattaggtccgccgggcgcgggaaaaggtacccaaggccgtattatttcggcaaagactggcatcccgcatattagcacgggcgatatcctgcgtgacatcgtcgctaagcaaaacgatgaagttgcctcgagcattaaagagtggatgctgaaaggtgaactcgttccagatgaactgggtaatgcggtagtaaaacgccgcctgaaggagaaagactgcgaaaaaggctttattttggatggtttcccgcgtaccgtgcgccaagcggaatatctggatagttttcttgaaagccagggccgccagttgacagccgccgtgctgattgaggtccccgaagatgaagttgttgcacgtctgctgtctcgccgtatctgtccgaaatgcgggcgtagttacaacatgatttttctgccaccaaaagaaggggagctgtgtgacgattgcggtgtcagcttagtacagcgtttagatgataaggaagaaacggtccgtcaccgcctgaaagtctaccgtgagaagacccagccggtcattgactattatagtaagaaaggtattctcgcacgcgtagatgggtcgcaaggaatcccacctatcgtggcagaagtcctggggattctgggttggagcgataag

SEQ ID NO: 2266 - protein, 231 aa, synthetic construct
  REGION 1..231: note = variant of adenylate kinase from Thermotoga neapolitana
MHHHHHHGGSGMGAYLVLLGPPGAGKGTQGRIISAKTGIPHISTGDILRDIVAKQNDEVASSIKEWMLKGELVPDELGNAVVKRRLKEKDCEKGFILDGFPRTVRQAEYLDSFLESQGRQLTAAVLIEVPEDEVVARLLSRRICPKCGRSYNMIFLPPKEGELCDDCGVSLVQRLDDKEETVRHRLKVYREKTQPVIDYYSKKGILARVDGSQGIPPIVAEVLGILGWSDK

SEQ ID NO: 2267 - DNA, 693 bp, synthetic construct
  misc_feature 1..693: note = variant of adenylate kinase from Thermotoga neapolitana
  source 1..693: mol_type = other DNA
atgcaccatcatcaccatcacgggggctccggcatgggggcatatctggtgttattaggtccgccgggcgcgggaaaaggtacccaaggccgtattatttcggcaaagactggcatcccgcatattagcacgggcgatatcctgcgtgacatcgtcgctaagcaaaacgatgaagttgcctcgagcattaaagagtggatgctgaaaggtgaactcgttccagatgaactgggtaatgcggtagtaaaacgccgcctgaaggagaaagactgcgaaaaaggctttattttggatggtttcccgcgtaccgtgcgccaagcggaatatctggatagttttcttgaaagccagggccgccagttgacagccgccgtgctgattgaggtccccgaagatgaagttgttgcacgtctgctgtctcgccgtatctgtccgaaatgcgggcgtagttacaacatgatttttctgccaccaaaagaagacggtctgtgtgacgattgcggtgtcagcttagtacagcgtttagatgataaggaagaaacggtccgtcaccgcctgaaagtctaccgtgagaagacccagccggtcattgactattatagtaagaaaggtattctcgcacgcgtagatgggtcgcaaggaatcccacctatcgtggcagaagtcctggggattctgggttggagcgataag

SEQ ID NO: 2268 - protein, 231 aa, synthetic construct
  REGION 1..231: note = variant of adenylate kinase from Thermotoga neapolitana
MHHHHHHGGSGMGAYLVLLGPPGAGKGTQGRIISAKTGIPHISTGDILRDIVAKQNDEVASSIKEWMLKGELVPDELGNAVVKRRLKEKDCEKGFILDGFPRTVRQAEYLDSFLESQGRQLTAAVLIEVPEDEVVARLLSRRICPKCGRSYNMIFLPPKEDGLCDDCGVSLVQRLDDKEETVRHRLKVYREKTQPVIDYYSKKGILARVDGSQGIPPIVAEVLGILGWSDK

SEQ ID NO: 2269 - DNA, 693 bp, synthetic construct
  misc_feature 1..693: note = variant of adenylate kinase from Thermotoga neapolitana
  source 1..693: mol_type = other DNA
atgcaccatcatcaccatcacgggggctccggcatgggggcatatctggtgttattaggtccgccgggcgcgggaaaaggtacccaaggccgtattatttcggcaaagactggcatcccgcatattagcacgggcgatatcctgcgtgacatcgtcgctaagcaaaacgatgaagttgcctcgagcattaaagagtggatgctgaaaggtgaactcgttccagatgaactgggtaatgcggtagtaaaacgccgcctgaaggagaaagactgcgaaaaaggctttattttggatggtttcccgcgtaccgtgcgccaagcggaatatctggatagttttcttgaaagccagggccgccagttgacagccgccgtgctgattgaggtccccgaagatgaagttgttgcacgtctgctgtctcgccgtatctgtccgaaatgcgggcgtagttacaactgtatttttctgccaccaaaagaagacgagctgtgtgacgattgcggtgtcagcttagtacagcgtttagatgataaggaagaaacggtccgtcaccgcctgaaagtctaccgtgagaagacccagccggtcattgactattatagtaagaaaggtattctcgcacgcgtagatgggtcgcaaggaatcccacctatcgtggcagaagtcctggggattctgggttggagcgataag

SEQ ID NO: 2270 - protein, 231 aa, synthetic construct
  REGION 1..231: note = variant of adenylate kinase from Thermotoga neapolitana
MHHHHHHGGSGMGAYLVLLGPPGAGKGTQGRIISAKTGIPHISTGDILRDIVAKQNDEVASSIKEWMLKGELVPDELGNAVVKRRLKEKDCEKGFILDGFPRTVRQAEYLDSFLESQGRQLTAAVLIEVPEDEVVARLLSRRICPKCGRSYNCIFLPPKEDELCDDCGVSLVQRLDDKEETVRHRLKVYREKTQPVIDYYSKKGILARVDGSQGIPPIVAEVLGILGWSDK

SEQ ID NO: 2271 - DNA, 693 bp, synthetic construct
  misc_feature 1..693: note = variant of adenylate kinase from Thermotoga neapolitana
  source 1..693: mol_type = other DNA
atgcaccatcatcaccatcacgggggctccggcatgggggcatatctggtgttattaggtccgccgggcgcgggaaaaggtacccaaggccgtattatttcggcaaagactggcatcccgcatattagcacgggcgatatcctgcgtgacatcgtcgctaagcaaaacgatgaagttgcctcgagcattaaagagtggatgctgaaaggtgaactcgttccagatgaactgggtaatgcggtagtaaaacgccgcctgaaggagaaagactgcgaaaaaggctttattttggatggtttcccgcgtaccgtgcgccaagcggaatatctggatagttttcttgaaagccagggccgccagttgacagccgccgtgctgattgaggtccccgaagatgaagttgttgcacgtctgctgtctcgccgtatctgtccgaaatgcgggcgtagttacaacatgatttttctgccaccaaaagaagacgagctgtgtgacgattgcggtgtcagcttagtacagcgtttagatgataaggaagaaacggtccgtcaccgcctgaaagtctaccgtgagaagacccagccggtcattgactattatagtaagaaaggtattctcgcacgcgtagatgggtcgcaaggaatccttcctatcgtggcagaagtcctggggattctgggttggagcgataag

SEQ ID NO: 2272 - protein, 231 aa, synthetic construct
  REGION 1..231: note = variant of adenylate kinase from Thermotoga neapolitana
MHHHHHHGGSGMGAYLVLLGPPGAGKGTQGRIISAKTGIPHISTGDILRDIVAKQNDEVASSIKEWMLKGELVPDELGNAVVKRRLKEKDCEKGFILDGFPRTVRQAEYLDSFLESQGRQLTAAVLIEVPEDEVVARLLSRRICPKCGRSYNMIFLPPKEDELCDDCGVSLVQRLDDKEETVRHRLKVYREKTQPVIDYYSKKGILARVDGSQGILPIVAEVLGILGWSDK

SEQ ID NO: 2273 - DNA, 693 bp, synthetic construct
  misc_feature 1..693: note = variant of adenylate kinase from Thermotoga neapolitana
  source 1..693: mol_type = other DNA
atgcaccatcatcaccatcacgggggctccggcatgggggcatatctggtgttattaggtccgccgggcgcgggaaaaggtacccaaggccgtattatttcggcaaagactggcatcccgcatattagcacgggcgatatcctgcgtgacatcgtcgctaagcaaaacgatgaagttgcctcgagcattaaagagtggatgctgaaaggtgaactcgttccagatgaactgggtaatgcggtagtaaaacgccgcctgaaggagaaagactgcgaaaaaggctttattttggatggtttcccgcgtaccgtgcgccaagcggaatatctggatagttttcttgaaagccagggccgccagttgacagccgccgtgctgattgaggtccccgaagatgaagttgttgcacgtctgctgtctcgccgtatctgtccgaaatgcgggcgtagttacaacatgatttttctgccaccaaaagaagacgagctgtgtgacgattgcggtgtcagcttagtacagcgtttagatgataaggaagaaacggtccgtcaccgcctgaaagtctaccgtgagaagacccagccggtcattgactattatagtaagaaaggtattctcgcacgcgtagatgggcagcaaggaatcccacctatcgtggcagaagtcctggggattctgggttggagcgataag

SEQ ID NO: 2274 - protein, 231 aa, synthetic construct
  REGION 1..231: note = variant of adenylate kinase from Thermotoga neapolitana
MHHHHHHGGSGMGAYLVLLGPPGAGKGTQGRIISAKTGIPHISTGDILRDIVAKQNDEVASSIKEWMLKGELVPDELGNAVVKRRLKEKDCEKGFILDGFPRTVRQAEYLDSFLESQGRQLTAAVLIEVPEDEVVARLLSRRICPKCGRSYNMIFLPPKEDELCDDCGVSLVQRLDDKEETVRHRLKVYREKTQPVIDYYSKKGILARVDGQQGIPPIVAEVLGILGWSDK

SEQ ID NO: 2275 - DNA, 693 bp, synthetic construct
  misc_feature 1..693: note = variant of adenylate kinase from Thermotoga neapolitana
  source 1..693: mol_type = other DNA
atgcaccatcatcaccatcacgggggctccggcatgggggcatatctggtgttattaggtccgccgggcgcgggaaaaggtacccaaggccgtattatttcggcaaagactggcatcccgcatattagcacgggcgatatcctgcgtgacatcgtcgctaagcaaaacgatgaagttgcctcgagcattaaagagtggatgctgaaaggtgaactcgttccagatgaactgggtaatgcggtagtaaaacgccgcctgaaggagaaagactgcgaaaaaggctttattttggatggtttcccgcgtaccgtgcgccaagcggaatatctggatagttttcttgaaagccagggccgccagttgacagccgccgtgctgattgaggtccccgaagatgaagttgttgcacgtctgctgtctcgccgtatctgtccgaaatgcgggcgtagttacaacatgatttttctgccaccaaaagaagacgagctgtgtgacgattgcggtgtcagcttagtacagcgtttagatgataaggaagaaacggtccgtcaccgcctgaaagtctaccgtgagaagacccagccggtcattgactattatagtaagaaaggtattctcgcacgcgtagatgggtcgcaaggaatccatcctatcgtggcagaagtcctggggattctgggttggagcgataag

SEQ ID NO: 2276 - protein, 231 aa, synthetic construct
  REGION 1..231: note = variant of adenylate kinase from Thermotoga neapolitana
MHHHHHHGGSGMGAYLVLLGPPGAGKGTQGRIISAKTGIPHISTGDILRDIVAKQNDEVASSIKEWMLKGELVPDELGNAVVKRRLKEKDCEKGFILDGFPRTVRQAEYLDSFLESQGRQLTAAVLIEVPEDEVVARLLSRRICPKCGRSYNMIFLPPKEDELCDDCGVSLVQRLDDKEETVRHRLKVYREKTQPVIDYYSKKGILARVDGSQGIHPIVAEVLGILGWSDK

SEQ ID NO: 2277 - DNA, 693 bp, synthetic construct
  misc_feature 1..693: note = variant of adenylate kinase from Thermotoga neapolitana
  source 1..693: mol_type = other DNA
atgcaccatcatcaccatcacgggggctccggcatgggggcatatctggtgttattaggtccgccgggcgcgggaaaaggtacccaaggccgtattatttcggcaaagactggcatcccgcatattagcacgggcgatatcctgcgtgacatcgtcgctaagcaaaacgatgaagttgcctcgagcattaaagagtggatgctgaaaggtgaactcgttccagatgaactgggtaatgcggtagtaaaacgccgcctgaaggagaaagactgcgaaaaaggctttattttggatggtttcccgcgtaccgtgcgccaagcggaatatctggatagttttcttgaaagccagggccgccagttgacagccgccgtgctgattgaggtccccgaagatgaagttgttgcacgtctgctgtctcgccgtatctgtccgaaatgcgggcgtagttacaacatgatttttgtgccaccaaaagaagacgagctgtgtgacgattgcggtgtcagcttagtacagcgtttagatgataaggaagaaacggtccgtcaccgcctgaaagtctaccgtgagaagacccagccggtcattgactattatagtaagaaaggtattctcgcacgcgtagatgggtcgcaaggaatcccacctatcgtggcagaagtcctggggattctgggttggagcgataag

SEQ ID NO: 2278 - protein, 231 aa, synthetic construct
  REGION 1..231: note = variant of adenylate kinase from Thermotoga neapolitana
MHHHHHHGGSGMGAYLVLLGPPGAGKGTQGRIISAKTGIPHISTGDILRDIVAKQNDEVASSIKEWMLKGELVPDELGNAVVKRRLKEKDCEKGFILDGFPRTVRQAEYLDSFLESQGRQLTAAVLIEVPEDEVVARLLSRRICPKCGRSYNMIFVPPKEDELCDDCGVSLVQRLDDKEETVRHRLKVYREKTQPVIDYYSKKGILARVDGSQGIPPIVAEVLGILGWSDK

SEQ ID NO: 2279 - DNA, 693 bp, synthetic construct
  misc_feature 1..693: note = variant of adenylate kinase from Thermotoga neapolitana
  source 1..693: mol_type = other DNA
atgcaccatcatcaccatcacgggggctccggcatgggggcatatctggtgttattaggtccgccgggcgcgggaaaaggtacccaaggccgtattatttcggcaaagactggcatcccgcatattagcacgggcgatatcctgcgtgacatcgtcgctaagcaaaacgatgaagttgcctcgagcattaaagagtggatgctgaaaggtgaactcgttccagatgaactgggtaatgcggtagtaaaacgccgcctgaaggagaaagactgcgaaaaaggctttattttggatggtttcccgcgtaccgtgcgccaagcggaatatctggatagttttcttgaaagccagggccgccagttgacagccgccgtgctgattgaggtccccgaagatgaagttgttgcacgtctgctgtctcgccgtatctgtccgaaatgcgggcgtagttacaacatgatttttctgccaccaaaagaactggagctgtgtgacgattgcggtgtcagcttagtacagcgtttagatgataaggaagaaacggtccgtcaccgcctgaaagtctaccgtgagaagacccagccggtcattgactattatagtaagaaaggtattctcgcacgcgtagatgggtcgcaaggaatcccacctatcgtggcagaagtcctggggattctgggttggagcgataag

SEQ ID NO: 2280 - protein, 231 aa, synthetic construct
  REGION 1..231: note = variant of adenylate kinase from Thermotoga neapolitana
MHHHHHHGGSGMGAYLVLLGPPGAGKGTQGRIISAKTGIPHISTGDILRDIVAKQNDEVASSIKEWMLKGELVPDELGNAVVKRRLKEKDCEKGFILDGFPRTVRQAEYLDSFLESQGRQLTAAVLIEVPEDEVVARLLSRRICPKCGRSYNMIFLPPKELELCDDCGVSLVQRLDDKEETVRHRLKVYREKTQPVIDYYSKKGILARVDGSQGIPPIVAEVLGILGWSDK

SEQ ID NO: 2281 - DNA, 693 bp, synthetic construct
  misc_feature 1..693: note = variant of adenylate kinase from Thermotoga neapolitana
  source 1..693: mol_type = other DNA
atgcaccatcatcaccatcacgggggctccggcatgggggcatatctggtgttattaggtccgccgggcgcgggaaaaggtacccaaggccgtattatttcggcaaagactggcatcccgcatattagcacgggcgatatcctgcgtgacatcgtcgctaagcaaaacgatgaagttgcctcgagcattaaagagtggatgctgaaaggtgaactcgttccagatgaactgggtaatgcggtagtaaaacgccgcctgaaggagaaagactgcgaaaaaggctttattttggatggtttcccgcgtaccgtgcgccaagcggaatatctggatagttttcttgaaagccagggccgccagttgacagccgccgtgctgattgaggtccccgaagatgaagttgttgcacgtctgctgtctcgccgtatctgtccgaaatgcgggcgtagttacaacatgatttttctgccaccaaaagaagacgagctgtgtgacgattgcggtgtcagcttagtacagcgtttagatgataaggaagaaacggtccgtcaccgcctgaaagtctaccgtgagaagacccagccggtcattgactattatagtaagaaaggtattctcgcacgcgtagatgggtcgcaatggatcccacctatcgtggcagaagtcctggggattctgggttggagcgataag

SEQ ID NO: 2282 - protein, 231 aa, synthetic construct
  REGION 1..231: note = variant of adenylate kinase from Thermotoga neapolitana
MHHHHHHGGSGMGAYLVLLGPPGAGKGTQGRIISAKTGIPHISTGDILRDIVAKQNDEVASSIKEWMLKGELVPDELGNAVVKRRLKEKDCEKGFILDGFPRTVRQAEYLDSFLESQGRQLTAAVLIEVPEDEVVARLLSRRICPKCGRSYNMIFLPPKEDELCDDCGVSLVQRLDDKEETVRHRLKVYREKTQPVIDYYSKKGILARVDGSQWIPPIVAEVLGILGWSDK

SEQ ID NO: 2283 - DNA, 693 bp, synthetic construct
  misc_feature 1..693: note = variant of adenylate kinase from Thermotoga neapolitana
  source 1..693: mol_type = other DNA
atgcaccatcatcaccatcacgggggctccggcatgggggcatatctggtgttattaggtccgccgggcgcgggaaaaggtacccaaggccgtattatttcggcaaagactggcatcccgcatattagcacgggcgatatcctgcgtgacatcgtcgctaagcaaaacgatgaagttgcctcgagcattaaagagtggatgctgaaaggtgaactcgttccagatgaactgggtaatgcggtagtaaaacgccgcctgaaggagaaagactgcgaaaaaggctttattttggatggtttcccgcgtaccgtgcgccaagcggaatatctggatagttttcttgaaagccagggccgccagttgacagccgccgtgctgattgaggtccccgaagatgaagttgttgcacgtctgctgtctcgccgtatctgtccgaaatgcgggcgtagttacaacatgatttttctgccaccaaaagaagacgagctgtgtgacgattgcggtgtcagcttagtacagcgtttagatgataaggaagaaacggtccgtcaccgcctgaaagtctaccgtgagaagacccagccggtcattgactattatagtaagaaaggtattctcgcacgcgtagatgggtcgcaaggaatcccacctatcgtggcagaagtcctggggattctgggttggtgtgataag

SEQ ID NO: 2284 - protein, 231 aa, synthetic construct
  REGION 1..231: note = variant of adenylate kinase from Thermotoga neapolitana
MHHHHHHGGSGMGAYLVLLGPPGAGKGTQGRIISAKTGIPHISTGDILRDIVAKQNDEVASSIKEWMLKGELVPDELGNAVVKRRLKEKDCEKGFILDGFPRTVRQAEYLDSFLESQGRQLTAAVLIEVPEDEVVARLLSRRICPKCGRSYNMIFLPPKEDELCDDCGVSLVQRLDDKEETVRHRLKVYREKTQPVIDYYSKKGILARVDGSQGIPPIVAEVLGILGWCDK

SEQ ID NO: 2285 - DNA, 693 bp, synthetic construct
  misc_feature 1..693: note = variant of adenylate kinase from Thermotoga neapolitana
  source 1..693: mol_type = other DNA
atgcaccatcatcaccatcacgggggctccggcatgggggcatatctggtgttattaggtccgccgggcgcgggaaaaggtacccaaggccgtattatttcggcaaagactggcatcccgcatattagcacgggcgatatcctgcgtgacatcgtcgctaagcaaaacgatgaagttgcctcgagcattaaagagtggatgctgaaaggtgaactcgttccagatgaactgggtaatgcggtagtaaaacgccgcctgaaggagaaagactgcgaaaaaggctttattttggatggtttcccgcgtaccgtgcgccaagcggaatatctggatagttttcttgaaagccagggccgccagttgacagccgccgtgctgattgaggtccccgaagatgaagttgttgcacgtctgctgtctcgccgtatctgtccgaaatgcgggcgtagttacaacatgatttttctgccaccaaaagaagacgagctgtgtgacgattgcggtgtcagcttagtacagcgtttagatgataaggaagaaacggtccgtcaccgcctgaaagtctaccgtgagaagacccagccggtcattgactattatagtaagaaaggtattctcgcacgcgtagatgggtcgcaaggaatcatgcctatcgtggcagaagtcctggggattctgggttggagcgataag

SEQ ID NO: 2286 - protein, 231 aa, synthetic construct
  REGION 1..231: note = variant of adenylate kinase from Thermotoga neapolitana
MHHHHHHGGSGMGAYLVLLGPPGAGKGTQGRIISAKTGIPHISTGDILRDIVAKQNDEVASSIKEWMLKGELVPDELGNAVVKRRLKEKDCEKGFILDGFPRTVRQAEYLDSFLESQGRQLTAAVLIEVPEDEVVARLLSRRICPKCGRSYNMIFLPPKEDELCDDCGVSLVQRLDDKEETVRHRLKVYREKTQPVIDYYSKKGILARVDGSQGIMPIVAEVLGILGWSDK

SEQ ID NO: 2287 - DNA, 693 bp, synthetic construct
  misc_feature 1..693: note = variant of adenylate kinase from Thermotoga neapolitana
  source 1..693: mol_type = other DNA
atgcaccatcatcaccatcacgggggctccggcatgggggcatatctggtgttattaggtccgccgggcgcgggaaaaggtacccaaggccgtattatttcggcaaagactggcatcccgcatattagcacgggcgatatcctgcgtgacatcgtcgctaagcaaaacgatgaagttgcctcgagcattaaagagtggatgctgaaaggtgaactcgttccagatgaactgggtaatgcggtagtaaaacgccgcctgaaggagaaagactgcgaaaaaggctttattttggatggtttcccgcgtaccgtgcgccaagcggaatatctggatagttttcttgaaagccagggccgccagttgacagccgccgtgctgattgaggtccccgaagatgaagttgttgcacgtctgctgtctcgccgtatctgtccgaaatgcgggcgtagttacaacatgatttttctgccaccaaaagaagacgagctgtgtgacgattgcggtgtcagcttagtacagcgtttagatgataaggaagaaacggtccgtcaccgcctgaaagtctaccgtgagaagacccagccggtcattgactattatagtaagaaaggtattctcgcacgcgtagatgggtcgcaaggaatcgtgcctatcgtggcagaagtcctggggattctgggttggagcgataag

SEQ ID NO: 2288 - protein, 231 aa, synthetic construct
  REGION 1..231: note = variant of adenylate kinase from Thermotoga neapolitana
MHHHHHHGGSGMGAYLVLLGPPGAGKGTQGRIISAKTGIPHISTGDILRDIVAKQNDEVASSIKEWMLKGELVPDELGNAVVKRRLKEKDCEKGFILDGFPRTVRQAEYLDSFLESQGRQLTAAVLIEVPEDEVVARLLSRRICPKCGRSYNMIFLPPKEDELCDDCGVSLVQRLDDKEETVRHRLKVYREKTQPVIDYYSKKGILARVDGSQGIVPIVAEVLGILGWSDK

SEQ ID NO: 2289 - DNA, 693 bp, synthetic construct
  misc_feature 1..693: note = variant of adenylate kinase from Thermotoga neapolitana
  source 1..693: mol_type = other DNA
atgcaccatcatcaccatcacgggggctccggcatgggggcatatctggtgttattaggtccgccgggcgcgggaaaaggtacccaaggccgtattatttcggcaaagactggcatcccgcatattagcacgggcgatatcctgcgtgacatcgtcgctaagcaaaacgatgaagttgcctcgagcattaaagagtggatgctgaaaggtgaactcgttccagatgaactgggtaatgcggtagtaaaacgccgcctgaaggagaaagactgcgaaaaaggctttattttggatggtttcccgcgtaccgtgcgccaagcggaatatctggatagttttcttgaaagccagggccgccagttgacagccgccgtgctgattgaggtccccgaagatgaagttgttgcacgtctgctgtctcgccgtatctgtccgaaatgcgggcgtagttacaacatgatttttctgccaccaaaagaagacgagctgtgtgacgattgcggtgtcagcttagtacagcgtttagatgataaggaagaaacggtccgtcaccgcctgaaagtctaccgtgagaagacccagccggtcattgactattatagtaagaaaggtattctcgcacgcgtagatgggtcgcaagcgatcccacctatcgtggcagaagtcctggggattctgggttggagcgataag

SEQ ID NO: 2290 - protein, 231 aa, synthetic construct
  REGION 1..231: note = variant of adenylate kinase from Thermotoga neapolitana
MHHHHHHGGSGMGAYLVLLGPPGAGKGTQGRIISAKTGIPHISTGDILRDIVAKQNDEVASSIKEWMLKGELVPDELGNAVVKRRLKEKDCEKGFILDGFPRTVRQAEYLDSFLESQGRQLTAAVLIEVPEDEVVARLLSRRICPKCGRSYNMIFLPPKEDELCDDCGVSLVQRLDDKEETVRHRLKVYREKTQPVIDYYSKKGILARVDGSQAIPPIVAEVLGILGWSDK

SEQ ID NO: 2291 - DNA, 693 bp, synthetic construct
  misc_feature 1..693: note = variant of adenylate kinase from Thermotoga neapolitana
  source 1..693: mol_type = other DNA
atgcaccatcatcaccatcacgggggctccggcatgggggcatatctggtgttattaggtccgccgggcgcgggaaaaggtacccaaggccgtattatttcggcaaagactggcatcccgcatattagcacgggcgatatcctgcgtgacatcgtcgctaagcaaaacgatgaagttgcctcgagcattaaagagtggatgctgaaaggtgaactcgttccagatgaactgggtaatgcggtagtaaaacgccgcctgaaggagaaagactgcgaaaaaggctttattttggatggtttcccgcgtaccgtgcgccaagcggaatatctggatagttttcttgaaagccagggccgccagttgacagccgccgtgctgattgaggtccccgaagatgaagttgttgcacgtctgctgtctcgccgtatctgtccgaaatgcgggcgtagttacaacatgatttttctgccaccaaaagaagacgagctgtgtgacgattgcggtgtcagcttagtacagcgtttagatgataaggaagaaacggtccgtcaccgcctgaaagtctaccgtgagaagacccagccggtcattgactattatagtaagaaaggtattctcgcacgcgtagatgggtcgcaaatgatcccacctatcgtggcagaagtcctggggattctgggttggagcgataag

SEQ ID NO: 2292 - protein, 231 aa, synthetic construct
  REGION 1..231: note = variant of adenylate kinase from Thermotoga neapolitana
MHHHHHHGGSGMGAYLVLLGPPGAGKGTQGRIISAKTGIPHISTGDILRDIVAKQNDEVASSIKEWMLKGELVPDELGNAVVKRRLKEKDCEKGFILDGFPRTVRQAEYLDSFLESQGRQLTAAVLIEVPEDEVVARLLSRRICPKCGRSYNMIFLPPKEDELCDDCGVSLVQRLDDKEETVRHRLKVYREKTQPVIDYYSKKGILARVDGSQMIPPIVAEVLGILGWSDK

SEQ ID NO: 2293 - DNA, 693 bp, synthetic construct
  misc_feature 1..693: note = variant of adenylate kinase from Thermotoga neapolitana
  source 1..693: mol_type = other DNA
atgcaccatcatcaccatcacgggggctccggcatgggggcatatctggtgttattaggtccgccgggcgcgggaaaaggtacccaaggccgtattatttcggcaaagactggcatcccgcatattagcacgggcgatatcctgcgtgacatcgtcgctaagcaaaacgatgaagttgcctcgagcattaaagagtggatgctgaaaggtgaactcgttccagatgaaattggtaatgcggtagtaaaacgccgcctgaaggagaaagactgcgaaaaaggctttattttggatggtttcccgcgtaccgtgcgccaagcggaatatctggatagttttcttgaaagccagggccgccagttgacagccgccgtgctgattgaggtccccgaagatgaagttgttgcacgtctgctgtctcgccgtgtttgtccgaaatgcgggcgtagttacaacatgatttttctgccaccaaaagaagacgagctgtgtgacgattgcggtgtcagcttagtacagcgtttagatgataaggaagaaacggtccgtcaccgcctgaaagtctaccgtgagaagacccagccggtcattgactattatagtaagaaaggtattctcgcacgcgtagatgggagccaagaaatccggcctatcgtggcagaagtcctggggattctgggttggagcgataag

SEQ ID NO: 2294 - protein, 231 aa, synthetic construct
  REGION 1..231: note = variant of adenylate kinase from Thermotoga neapolitana
MHHHHHHGGSGMGAYLVLLGPPGAGKGTQGRIISAKTGIPHISTGDILRDIVAKQNDEVASSIKEWMLKGELVPDEIGNAVVKRRLKEKDCEKGFILDGFPRTVRQAEYLDSFLESQGRQLTAAVLIEVPEDEVVARLLSRRVCPKCGRSYNMIFLPPKEDELCDDCGVSLVQRLDDKEETVRHRLKVYREKTQPVIDYYSKKGILARVDGSQEIRPIVAEVLGILGWSDK

SEQ ID NO: 2295 - DNA, 693 bp, synthetic construct
  misc_feature 1..693: note = variant of adenylate kinase from Thermotoga neapolitana
  source 1..693: mol_type = other DNA
atgcaccatcatcaccatcacgggggctccggcatgggggcatatctggtgttattaggtccgccgggcgcgggaaaaggtacccaaggccgtattatttcggcaaagactggcatcccgcatattagcacgggcgatatcctgcgtgacatcgtcgctaagcaaaacgatgaagttgcctcgagcattaaagagtggatgctgaaaggtgaactcgttccagatgaactgggtaatgcggtagtaaaacgccgcctgaaggagaaagactgcgaaaaaggctttattttggatggtttcccgcgtaccgtgcgccaagcggaatatctggatagttttcttgaaagccagggccgccagttgacagccgccgtgctgattgaggtccccgaagatgaagttgttgcacgtctgctgtctcgccgtgtttgtccgaaatgcgggcgtagttacaacatgatttttgtgccaccaaaagaagatgaactgtgtgacgattgcggtgtcagcttagtacagcgtttagatgataaggaagaaacggtccgtcaccgcctgaaagtctaccgtgagaagacccagccggtcattgactattatagtaagaaaggtattctcgcacgcgtagatgggagccaaggaatccggcctatcgtggcagaagtcctggggattctgggttggagcgataag

SEQ ID NO: 2296 - protein, 231 aa, synthetic construct
  REGION 1..231: note = variant of adenylate kinase from Thermotoga neapolitana
MHHHHHHGGSGMGAYLVLLGPPGAGKGTQGRIISAKTGIPHISTGDILRDIVAKQNDEVASSIKEWMLKGELVPDELGNAVVKRRLKEKDCEKGFILDGFPRTVRQAEYLDSFLESQGRQLTAAVLIEVPEDEVVARLLSRRVCPKCGRSYNMIFVPPKEDELCDDCGVSLVQRLDDKEETVRHRLKVYREKTQPVIDYYSKKGILARVDGSQGIRPIVAEVLGILGWSDK

SEQ ID NO: 2297 - DNA, 693 bp, synthetic construct
  misc_feature 1..693: note = variant of adenylate kinase from Thermotoga neapolitana
  source 1..693: mol_type = other DNA
atgcaccatcatcaccatcacgggggctccggcatgggggcatatctggtgttattaggtccgccgggcgcgggaaaaggtacccaaggccgtattatttcggcaaagactggcatcccgcatattagcacgggcgatatcctgcgtgacatcgtcgctaagcaaaacgatgaagttgcctcgagcattaaagagtggatgctgaaaggtgaactcgttccagatgaaattggtaatgcggtagtaaaacgccgcctgaaggagaaagactgcgaaaaaggctttattttggatggtttcccgcgtaccgtgcgccaagcggaatatctggatagttttcttgaaagccagggccgccagttgacagccgccgtgctgattgaggtccccgaagatgaagttgttgcacgtctgctgtctcgccgtgtttgtccgaaatgcgggcgtagttacaacatgatttttctgccaccaaaagaagacgagctgtgtgacgattgcggtgtcagcttagtacagcgtttagatgataaggaagaaacggtccgtcaccgcctgaaagtctaccgtgagaagacccagccggtcattgactattatagtaagaaaggtattctcgcacgcgtagatgggtcgcaaggaatcccacctatcgtggcagaagtcctggggattctgggttggagcgataag

SEQ ID NO: 2298 - protein, 231 aa, synthetic construct
  REGION 1..231: note = variant of adenylate kinase from Thermotoga neapolitana
MHHHHHHGGSGMGAYLVLLGPPGAGKGTQGRIISAKTGIPHISTGDILRDIVAKQNDEVASSIKEWMLKGELVPDEIGNAVVKRRLKEKDCEKGFILDGFPRTVRQAEYLDSFLESQGRQLTAAVLIEVPEDEVVARLLSRRVCPKCGRSYNMIFLPPKEDELCDDCGVSLVQRLDDKEETVRHRLKVYREKTQPVIDYYSKKGILARVDGSQGIPPIVAEVLGILGWSDK

SEQ ID NO: 2299 - DNA, 693 bp, synthetic construct
  misc_feature 1..693: note = variant of adenylate kinase from Thermotoga neapolitana
  source 1..693: mol_type = other DNA
atgcaccatcatcaccatcacgggggctccggcatgggggcatatctggtgttattaggtccgccgggcgcgggaaaaggtacccaaggccgtattatttcggcaaagactggcatcccgcatattagcacgggcgatatcctgcgtgacatcgtcgctaagcaaaacgatgaagttgcctcgagcattaaagagtggatgctgaaaggtgaactcgttccagatgaaattggtaatgcggtagtaaaacgccgcctgaaggagaaagactgcgaaaaaggctttattttggatggtttcccgcgtaccgtgcgccaagcggaatatctggatagttttcttgaaagccagggccgccagttgacagccgccgtgctgattgaggtccccgaagatgaagttgttgcacgtctgctgtctcgccgtgtttgtccgaaatgcgggcgtagttacaacatgatttttctgccaccaaaagaagacgagctgtgtgacgattgcggtgtcagcttagtacagcgtttagatgataaggaagaaacggtccgtcaccgcctgaaagtctaccgtgagaagacccagccggtcattgactattatagtaagaaaggtattctcgcacgcgtagatgggagccaaggaatccggcctatcgtggcagaagtcctggggattctgggttggagcgataag

SEQ ID NO: 2300 - protein, 231 aa, synthetic construct
  REGION 1..231: note = variant of adenylate kinase from Thermotoga neapolitana
MHHHHHHGGSGMGAYLVLLGPPGAGKGTQGRIISAKTGIPHISTGDILRDIVAKQNDEVASSIKEWMLKGELVPDEIGNAVVKRRLKEKDCEKGFILDGFPRTVRQAEYLDSFLESQGRQLTAAVLIEVPEDEVVARLLSRRVCPKCGRSYNMIFLPPKEDELCDDCGVSLVQRLDDKEETVRHRLKVYREKTQPVIDYYSKKGILARVDGSQGIRPIVAEVLGILGWSDK

SEQ ID NO: 2301 - DNA, 693 bp, synthetic construct
  misc_feature 1..693: note = variant of adenylate kinase from Thermotoga neapolitana
  source 1..693: mol_type = other DNA
atgcaccatcatcaccatcacgggggctccggcatgggggcatatctggtgttattaggtccgccgggcgcgggaaaaggtacccaaggccgtattatttcggcaaagactggcatcccgcatattagcacgggcgatatcctgcgtgacatcgtcgctaagcaaaacgatgaagttgcctcgagcattaaagagtggatgctgaaaggtgaactcgttccagatgaaattggtaatgcggtagtaaaacgccgcctgaaggagaaagactgcgaaaaaggctttattttggatggtttcccgcgtaccgtgcgccaagcggaatatctggatagttttcttgaaagccagggccgccagttgacagccgccgtgctgattgaggtccccgaagatgaagttgttgcacgtctgctgtctcgccgtatttgtccgaaatgcgggcgtagttacaacatgatttttctgccaccaaaagaagatgaactgtgtgacgattgcggtgtcagcttagtacagcgtttagatgataaggaagaaacggtccgtcaccgcctgaaagtctaccgtgagaagacccagccggtcattgactattatagtaagaaaggtattctcgcacgcgtagatgggagccaagaaatccggcctatcgtggcagaagtcctggggattctgggttggagcgataag

SEQ ID NO: 2302 - protein, 231 aa, synthetic construct
  REGION 1..231: note = variant of adenylate kinase from Thermotoga neapolitana
MHHHHHHGGSGMGAYLVLLGPPGAGKGTQGRIISAKTGIPHISTGDILRDIVAKQNDEVASSIKEWMLKGELVPDEIGNAVVKRRLKEKDCEKGFILDGFPRTVRQAEYLDSFLESQGRQLTAAVLIEVPEDEVVARLLSRRICPKCGRSYNMIFLPPKEDELCDDCGVSLVQRLDDKEETVRHRLKVYREKTQPVIDYYSKKGILARVDGSQEIRPIVAEVLGILGWSDK

SEQ ID NO: 2303 - DNA, 693 bp, synthetic construct
  misc_feature 1..693: note = variant of adenylate kinase from Thermotoga neapolitana
  source 1..693: mol_type = other DNA
atgcaccatcatcaccatcacgggggctccggcatgggggcatatctggtgttattaggtccgccgggcgcgggaaaaggtacccaaggccgtattatttcggcaaagactggcatcccgcatattagcacgggcgatatcctgcgtgacatcgtcgctaagcaaaacgatgaagttgcctcgagcattaaagagtggatgctgaaaggtgaactcgttccagatgaaattggtaatgcggtagtaaaacgccgcctgaaggagaaagactgcgaaaaaggctttattttggatggtttcccgcgtaccgtgcgccaagcggaatatctggatagttttcttgaaagccagggccgccagttgacagccgccgtgctgattgaggtccccgaagatgaagttgttgcacgtctgctgtctcgccgtatttgtccgaaatgcgggcgtagttacaacatgatttttctgccaccaaaagaagacgagctgtgtgacgattgcggtgtcagcttagtacagcgtttagatgataaggaagaaacggtccgtcaccgcctgaaagtctaccgtgagaagacccagccggtcattgactattatagtaagaaaggtattctcgcacgcgtagatgggtcgcaaggaatcctgcctatcgtggcagaagtcctggggattctgggttggagcgataag

SEQ ID NO: 2304 - protein, 231 aa, synthetic construct
  REGION 1..231: note = variant of adenylate kinase from Thermotoga neapolitana
MHHHHHHGGSGMGAYLVLLGPPGAGKGTQGRIISAKTGIPHISTGDILRDIVAKQNDEVASSIKEWMLKGELVPDEIGNAVVKRRLKEKDCEKGFILDGFPRTVRQAEYLDSFLESQGRQLTAAVLIEVPEDEVVARLLSRRICPKCGRSYNMIFLPPKEDELCDDCGVSLVQRLDDKEETVRHRLKVYREKTQPVIDYYSKKGILARVDGSQGILPIVAEVLGILGWSDK

SEQ ID NO: 2305 - DNA, 693 bp, synthetic construct
  misc_feature 1..693: note = variant of adenylate kinase from Thermotoga neapolitana
  source 1..693: mol_type = other DNA
atgcaccatcatcaccatcacgggggctccggcatgggggcatatctggtgttattaggtccgccgggcgcgggaaaaggtacccaaggccgtattatttcggcaaagactggcatcccgcatattagcacgggcgatatcctgcgtgacatcgtcgctaagcaaaacgatgaagttgcctcgagcattaaagagtggatgctgaaaggtgaactcgttccagatgaacttggtaatgcggtagtaaaacgccgcctgaaggagaaagactgcgaaaaaggctttattttggatggtttcccgcgtaccgtgcgccaagcggaatatctggatagttttcttgaaagccagggccgccagttgacagccgccgtgctgattgaggtccccgaagatgaagttgttgcacgtctgctgtctcgccgtgtttgtccgaaatgcgggcgtagttacaacatgatttttgtgccaccaaaagaagatgaactgtgtgacgattgcggtgtcagcttagtacagcgtttagatgataaggaagaaacggtccgtcaccgcctgaaagtctaccgtgagaagacccagccggtcattgactattatagtaagaaaggtattctcgcacgcgtagatgggtcgcaaggaatcccacctatcgtggcagaagtcctggggattctgggttggagcgataag

SEQ ID NO: 2306 - protein, 231 aa, synthetic construct
  REGION 1..231: note = variant of adenylate kinase from Thermotoga neapolitana
MHHHHHHGGSGMGAYLVLLGPPGAGKGTQGRIISAKTGIPHISTGDILRDIVAKQNDEVASSIKEWMLKGELVPDELGNAVVKRRLKEKDCEKGFILDGFPRTVRQAEYLDSFLESQGRQLTAAVLIEVPEDEVVARLLSRRVCPKCGRSYNMIFVPPKEDELCDDCGVSLVQRLDDKEETVRHRLKVYREKTQPVIDYYSKKGILARVDGSQGIPPIVAEVLGILGWSDK

SEQ ID NO: 2307 - DNA, 693 bp, synthetic construct
  misc_feature 1..693: note = variant of adenylate kinase from Thermotoga neapolitana
  source 1..693: mol_type = other DNA
atgcaccatcatcaccatcacgggggctccggcatgggggcatatctggtgttattaggtccgccgggcgcgggaaaaggtacccaaggccgtattatttcggcaaagactggcatcccgcatattagcacgggcgatatcctgcgtgacatcgtcgctaagcaaaacgatgaagttgcctcgagcattaaagagtggatgctgaaaggtgaactcgttccagatgaacttggtaatgcggtagtaaaacgccgcctgaaggagaaagactgcgaaaaaggctttattttggatggtttcccgcgtaccgtgcgccaagcggaatatctggatagttttcttgaaagccagggccgccagttgacagccgccgtgctgattgaggtccccgaagatgaagttgttgcacgtctgctgtctcgccgtatttgtccgaaatgcgggcgtagttacaacatgatttttgtgccaccaaaagaagatgaactgtgtgacgattgcggtgtcagcttagtacagcgtttagatgataaggaagaaacggtccgtcaccgcctgaaagtctaccgtgagaagacccagccggtcattgactattatagtaagaaaggtattctcgcacgcgtagatgggagccaaggaatccggcctatcgtggcagaagtcctggggattctgggttggagcgataag

SEQ ID NO: 2308 - protein, 231 aa, synthetic construct
  REGION 1..231: note = variant of adenylate kinase from Thermotoga neapolitana
MHHHHHHGGSGMGAYLVLLGPPGAGKGTQGRIISAKTGIPHISTGDILRDIVAKQNDEVASSIKEWMLKGELVPDELGNAVVKRRLKEKDCEKGFILDGFPRTVRQAEYLDSFLESQGRQLTAAVLIEVPEDEVVARLLSRRICPKCGRSYNMIFVPPKEDELCDDCGVSLVQRLDDKEETVRHRLKVYREKTQPVIDYYSKKGILARVDGSQGIRPIVAEVLGILGWSDK

SEQ ID NO: 2309 - DNA, 693 bp, synthetic construct
  misc_feature 1..693: note = variant of adenylate kinase from Thermotoga neapolitana
  source 1..693: mol_type = other DNA
atgcaccatcatcaccatcacgggggctccggcatgggggcatatctggtgttattaggtccgccgggcgcgggaaaaggtacccaaggccgtattatttcggcaaagactggcatcccgcatattagcacgggcgatatcctgcgtgacatcgtcgctaagcaaaacgatgaagttgcctcgagcattaaagagtggatgctgaaaggtgaactcgttccagatgaacttggtaatgcggtagtaaaacgccgcctgaaggagaaagactgcgaaaaaggctttattttggatggtttcccgcgtaccgtgcgccaagcggaatatctggatagttttcttgaaagccagggccgccagttgacagccgccgtgctgattgaggtccccgaagatgaagttgttgcacgtctgctgtctcgccgtgtttgtccgaaatgcgggcgtagttacaacatgatttttctgccaccaaaagaagacgagctgtgtgacgattgcggtgtcagcttagtacagcgtttagatgataaggaagaaacggtccgtcaccgcctgaaagtctaccgtgagaagacccagccggtcattgactattatagtaagaaaggtattctcgcacgcgtagatgggagccaaggaatcccgcctatcgtggcagaagtcctggggattctgggttggagcgataag

SEQ ID NO: 2310 - protein, 231 aa, synthetic construct
  REGION 1..231: note = variant of adenylate kinase from Thermotoga neapolitana
MHHHHHHGGSGMGAYLVLLGPPGAGKGTQGRIISAKTGIPHISTGDILRDIVAKQNDEVASSIKEWMLKGELVPDELGNAVVKRRLKEKDCEKGFILDGFPRTVRQAEYLDSFLESQGRQLTAAVLIEVPEDEVVARLLSRRVCPKCGRSYNMIFLPPKEDELCDDCGVSLVQRLDDKEETVRHRLKVYREKTQPVIDYYSKKGILARVDGSQGIPPIVAEVLGILGWSDK

SEQ ID NO: 2311 - DNA, 693 bp, synthetic construct
  misc_feature 1..693: note = variant of adenylate kinase from Thermotoga neapolitana
  source 1..693: mol_type = other DNA
atgcaccatcatcaccatcacgggggctccggcatgggggcatatctggtgttattaggtccgccgggcgcgggaaaaggtacccaaggccgtattatttcggcaaagactggcatcccgcatattagcacgggcgatatcctgcgtgacatcgtcgctaagcaaaacgatgaagttgcctcgagcattaaagagtggatgctgaaaggtgaactcgttccagatgaaattggtaatgcggtagtaaaacgccgcctgaaggagaaagactgcgaaaaaggctttattttggatggtttcccgcgtaccgtgcgccaagcggaatatctggatagttttcttgaaagccagggccgccagttgacagccgccgtgctgattgaggtccccgaagatgaagttgttgcacgtctgctgtctcgccgtatttgtccgaaatgcgggcgtagttacaacatgatttttctgccaccaaaagaagacgagctgtgtgacgattgcggtgtcagcttagtacagcgtttagatgataaggaagaaacggtccgtcaccgcctgaaagtctaccgtgagaagacccagccggtcattgactattatagtaagaaaggtattctcgcacgcgtagatgggagccaagaaatcctgcctatcgtggcagaagtcctggggattctgggttggagcgataag

SEQ ID NO: 2312 - protein, 231 aa, synthetic construct
  REGION 1..231: note = variant of adenylate kinase from Thermotoga neapolitana
MHHHHHHGGSGMGAYLVLLGPPGAGKGTQGRIISAKTGIPHISTGDILRDIVAKQNDEVASSIKEWMLKGELVPDEIGNAVVKRRLKEKDCEKGFILDGFPRTVRQAEYLDSFLESQGRQLTAAVLIEVPEDEVVARLLSRRICPKCGRSYNMIFLPPKEDELCDDCGVSLVQRLDDKEETVRHRLKVYREKTQPVIDYYSKKGILARVDGSQEILPIVAEVLGILGWSDK

SEQ ID NO: 2313 - DNA, 693 bp, synthetic construct
  misc_feature 1..693: note = variant of adenylate kinase from Thermotoga neapolitana
  source 1..693: mol_type = other DNA
atgcaccatcatcaccatcacgggggctccggcatgggggcatatctggtgttattaggtccgccgggcgcgggaaaaggtacccaaggccgtattatttcggcaaagactggcatcccgcatattagcacgggcgatatcctgcgtgacatcgtcgctaagcaaaacgatgaagttgcctcgagcattaaagagtggatgctgaaaggtgaactcgttccagatgaaattggtaatgcggtagtaaaacgccgcctgaaggagaaagactgcgaaaaaggctttattttggatggtttcccgcgtaccgtgcgccaagcggaatatctggatagttttcttgaaagccagggccgccagttgacagccgccgtgctgattgaggtccccgaagatgaagttgttgcacgtctgctgtctcgccgtatttgtccgaaatgcgggcgtagttacaacatgatttttctgccaccaaaagaagacgagctgtgtgacgattgcggtgtcagcttagtacagcgtttagatgataaggaagaaacggtccgtcaccgcctgaaagtctaccgtgagaagacccagccggtcattgactattatagtaagaaaggtattctcgcacgcgtagatgggtcgcaaggaatcccacctatcgtggcagaagtcctggggattctgggttggagcgataag

SEQ ID NO: 2314 - protein, 231 aa, synthetic construct
  REGION 1..231: note = variant of adenylate kinase from Thermotoga neapolitana
MHHHHHHGGSGMGAYLVLLGPPGAGKGTQGRIISAKTGIPHISTGDILRDIVAKQNDEVASSIKEWMLKGELVPDEIGNAVVKRRLKEKDCEKGFILDGFPRTVRQAEYLDSFLESQGRQLTAAVLIEVPEDEVVARLLSRRICPKCGRSYNMIFLPPKEDELCDDCGVSLVQRLDDKEETVRHRLKVYREKTQPVIDYYSKKGILARVDGSQGIPPIVAEVLGILGWSDK

SEQ ID NO: 2315 - DNA, 693 bp, synthetic construct
  misc_feature 1..693: note = variant of adenylate kinase from Thermotoga neapolitana
  source 1..693: mol_type = other DNA
atgcaccatcatcaccatcacgggggctccggcatgggggcatatctggtgttattaggtccgccgggcgcgggaaaaggtacccaaggccgtattatttcggcaaagactggcatcccgcatattagcacgggcgatatcctgcgtgacatcgtcgctaagcaaaacgatgaagttgcctcgagcattaaagagtggatgctgaaaggtgaactcgttccagatgaaattggtaatgcggtagtaaaacgccgcctgaaggagaaagactgcgaaaaaggctttattttggatggtttcccgcgtaccgtgcgccaagcggaatatctggatagttttcttgaaagccagggccgccagttgacagccgccgtgctgattgaggtccccgaagatgaagttgttgcacgtctgctgtctcgccgtatttgtccgaaatgcgggcgtagttacaacatgatttttctgccaccaaaagaagacgagctgtgtgacgattgcggtgtcagcttagtacagcgtttagatgataaggaagaaacggtccgtcaccgcctgaaagtctaccgtgagaagacccagccggtcattgactattatagtaagaaaggtattctcgcacgcgtagatgggagccaagaaatcccgcctatcgtggcagaagtcctggggattctgggttggagcgataag

SEQ ID NO: 2316 - protein, 231 aa, synthetic construct
  REGION 1..231: note = variant of adenylate kinase from Thermotoga neapolitana
MHHHHHHGGSGMGAYLVLLGPPGAGKGTQGRIISAKTGIPHISTGDILRDIVAKQNDEVASSIKEWMLKGELVPDEIGNAVVKRRLKEKDCEKGFILDGFPRTVRQAEYLDSFLESQGRQLTAAVLIEVPEDEVVARLLSRRICPKCGRSYNMIFLPPKEDELCDDCGVSLVQRLDDKEETVRHRLKVYREKTQPVIDYYSKKGILARVDGSQEIPPIVAEVLGILGWSDK

SEQ ID NO: 2317 - DNA, 693 bp, synthetic construct
  misc_feature 1..693: note = variant of adenylate kinase from Thermotoga neapolitana
  source 1..693: mol_type = other DNA
atgcaccatcatcaccatcacgggggctccggcatgggggcatatctggtgttattaggtccgccgggcgcgggaaaaggtacccaaggccgtattatttcggcaaagactggcatcccgcatattagcacgggcgatatcctgcgtgacatcgtcgctaagcaaaacgatgaagttgcctcgagcattaaagagtggatgctgaaaggtgaactcgttccagatgaaattggtaatgcggtagtaaaacgccgcctgaaggagaaagactgcgaaaaaggctttattttggatggtttcccgcgtaccgtgcgccaagcggaatatctggatagttttcttgaaagccagggccgccagttgacagccgccgtgctgattgaggtccccgaagatgaagttgttgcacgtctgctgtctcgccgtgtttgtccgaaatgcgggcgtagttacaacatgatttttctgccaccaaaagaactgggactgtgtgacgattgcggtgtcagcttagtacagcgtttagatgataaggaagaaacggtccgtcaccgcctgaaagtctaccgtgagaagacccagccggtcattgactattatagtaagaaaggtattctcgcacgcgtagatgggcagcaagaaatcccgcctatcgtggcagaagtcctggggattctgggttggagcgataag

SEQ ID NO: 2318 - protein, 231 aa, synthetic construct
  REGION 1..231: note = variant of adenylate kinase from Thermotoga neapolitana
MHHHHHHGGSGMGAYLVLLGPPGAGKGTQGRIISAKTGIPHISTGDILRDIVAKQNDEVASSIKEWMLKGELVPDEIGNAVVKRRLKEKDCEKGFILDGFPRTVRQAEYLDSFLESQGRQLTAAVLIEVPEDEVVARLLSRRVCPKCGRSYNMIFLPPKELGLCDDCGVSLVQRLDDKEETVRHRLKVYREKTQPVIDYYSKKGILARVDGQQEIPPIVAEVLGILGWSDK

SEQ ID NO: 2319 - DNA, 693 bp, synthetic construct
  misc_feature 1..693: note = variant of adenylate kinase from Thermotoga neapolitana
  source 1..693: mol_type = other DNA
atgcaccatcatcaccatcacgggggctccggcatgggggcatatctggtgttattaggtccgccgggcgcgggaaaaggtacccaaggccgtattatttcggcaaagactggcatcccgcatattagcacgggcgatatcctgcgtgacatcgtcgctaagcaaaacgatgaagttgcctcgagcattaaagagtggatgctgaaaggtgaactcgttccagatgaaattggtaatgcggtagtaaaacgccgcctgaaggagaaagactgcgaaaaaggctttattttggatggtttcccgcgtaccgtgcgccaagcggaatatctggatagttttcttgaaagccagggccgccagttgacagccgccgtgctgattgaggtccccgaagatgaagttgttgcacgtctgctgtctcgccgtatttgtccgaaatgcgggcgtagttacaacatgatttttctgccaccaaaagaagatggactgtgtgacgattgcggtgtcagcttagtacagcgtttagatgataaggaagaaacggtccgtcaccgcctgaaagtctaccgtgagaagacccagccggtcattgactattatagtaagaaaggtattctcgcacgcgtagatgggagccaagaaatcctgcctatcgtggcagaagtcctggggattctgggttggagcgataag

SEQ ID NO: 2320 - protein, 231 aa, synthetic construct
  REGION 1..231: note = variant of adenylate kinase from Thermotoga neapolitana
MHHHHHHGGSGMGAYLVLLGPPGAGKGTQGRIISAKTGIPHISTGDILRDIVAKQNDEVASSIKEWMLKGELVPDEIGNAVVKRRLKEKDCEKGFILDGFPRTVRQAEYLDSFLESQGRQLTAAVLIEVPEDEVVARLLSRRICPKCGRSYNMIFLPPKEDGLCDDCGVSLVQRLDDKEETVRHRLKVYREKTQPVIDYYSKKGILARVDGSQEILPIVAEVLGILGWSDK

SEQ ID NO: 2321 - DNA, 693 bp, synthetic construct
  misc_feature 1..693: note = variant of adenylate kinase from Thermotoga neapolitana
  source 1..693: mol_type = other DNA
atgcaccatcatcaccatcacgggggctccggcatgggggcatatctggtgttattaggtccgccgggcgcgggaaaaggtacccaaggccgtattatttcggcaaagactggcatcccgcatattagcacgggcgatatcctgcgtgacatcgtcgctaagcaaaacgatgaagttgcctcgagcattaaagagtggatgctgaaaggtgaactcgttccagatgaaattggtaatgcggtagtaaaacgccgcctgaaggagaaagactgcgaaaaaggctttattttggatggtttcccgcgtaccgtgcgccaagcggaatatctggatagttttcttgaaagccagggccgccagttgacagccgccgtgctgattgaggtccccgaagatgaagttgttgcacgtctgctgtctcgccgtgtttgtccgaaatgcgggcgtagttacaacatgatttttgtgccaccaaaagaagatgaactgtgtgacgattgcggtgtcagcttagtacagcgtttagatgataaggaagaaacggtccgtcaccgcctgaaagtctaccgtgagaagacccagccggtcattgactattatagtaagaaaggtattctcgcacgcgtagatgggagccaagaaatcctgcctatcgtggcagaagtcctggggattctgggttggagcgataag

SEQ ID NO: 2322 - protein, 231 aa, synthetic construct
  REGION 1..231: note = variant of adenylate kinase from Thermotoga neapolitana
MHHHHHHGGSGMGAYLVLLGPPGAGKGTQGRIISAKTGIPHISTGDILRDIVAKQNDEVASSIKEWMLKGELVPDEIGNAVVKRRLKEKDCEKGFILDGFPRTVRQAEYLDSFLESQGRQLTAAVLIEVPEDEVVARLLSRRVCPKCGRSYNMIFVPPKEDELCDDCGVSLVQRLDDKEETVRHRLKVYREKTQPVIDYYSKKGILARVDGSQEILPIVAEVLGILGWSDK

SEQ ID NO: 2323 - DNA, 693 bp, synthetic construct
  misc_feature 1..693: note = variant of adenylate kinase from Thermotoga neapolitana
  source 1..693: mol_type = other DNA
atgcaccatcatcaccatcacgggggctccggcatgggggcatatctggtgttattaggtccgccgggcgcgggaaaaggtacccaaggccgtattatttcggcaaagactggcatcccgcatattagcacgggcgatatcctgcgtgacatcgtcgctaagcaaaacgatgaagttgcctcgagcattaaagagtggatgctgaaaggtgaactcgttccagatgaaattggtaatgcggtagtaaaacgccgcctgaaggagaaagactgcgaaaaaggctttattttggatggtttcccgcgtaccgtgcgccaagcggaatatctggatagttttcttgaaagccagggccgccagttgacagccgccgtgctgattgaggtccccgaagatgaagttgttgcacgtctgctgtctcgccgtgtttgtccgaaatgcgggcgtagttacaacatgatttttgtgccaccaaaagaagatggactgtgtgacgattgcggtgtcagcttagtacagcgtttagatgataaggaagaaacggtccgtcaccgcctgaaagtctaccgtgagaagacccagccggtcattgactattatagtaagaaaggtattctcgcacgcgtagatgggcagcaaggaatccggcctatcgtggcagaagtcctggggattctgggttggagcgataag

SEQ ID NO: 2324 - protein, 231 aa, synthetic construct
  REGION 1..231: note = variant of adenylate kinase from Thermotoga neapolitana
MHHHHHHGGSGMGAYLVLLGPPGAGKGTQGRIISAKTGIPHISTGDILRDIVAKQNDEVASSIKEWMLKGELVPDEIGNAVVKRRLKEKDCEKGFILDGFPRTVRQAEYLDSFLESQGRQLTAAVLIEVPEDEVVARLLSRRVCPKCGRSYNMIFVPPKEDGLCDDCGVSLVQRLDDKEETVRHRLKVYREKTQPVIDYYSKKGILARVDGQQGIRPIVAEVLGILGWSDK

SEQ ID NO: 2325 - DNA, 693 bp, synthetic construct
  misc_feature 1..693: note = variant of adenylate kinase from Thermotoga neapolitana
  source 1..693: mol_type = other DNA
atgcaccatcatcaccatcacgggggctccggcatgggggcatatctggtgttattaggtccgccgggcgcgggaaaaggtacccaaggccgtattatttcggcaaagactggcatcccgcatattagcacgggcgatatcctgcgtgacatcgtcgctaagcaaaacgatgaagttgcctcgagcattaaagagtggatgctgaaaggtgaactcgttccagatgaaattggtaatgcggtagtaaaacgccgcctgaaggagaaagactgcgaaaaaggctttattttggatggtttcccgcgtaccgtgcgccaagcggaatatctggatagttttcttgaaagccagggccgccagttgacagccgccgtgctgattgaggtccccgaagatgaagttgttgcacgtctgctgtctcgccgtgtttgtccgaaatgcgggcgtagttacaacatgatttttgtgccaccaaaagaactggaactgtgtgacgattgcggtgtcagcttagtacagcgtttagatgataaggaagaaacggtccgtcaccgcctgaaagtctaccgtgagaagacccagccggtcattgactattatagtaagaaaggtattctcgcacgcgtagatgggagccaagaaatccggcctatcgtggcagaagtcctggggattctgggttggagcgataag

SEQ ID NO: 2326 - protein, 231 aa, synthetic construct
  REGION 1..231: note = variant of adenylate kinase from Thermotoga neapolitana
MHHHHHHGGSGMGAYLVLLGPPGAGKGTQGRIISAKTGIPHISTGDILRDIVAKQNDEVASSIKEWMLKGELVPDEIGNAVVKRRLKEKDCEKGFILDGFPRTVRQAEYLDSFLESQGRQLTAAVLIEVPEDEVVARLLSRRVCPKCGRSYNMIFVPPKELELCDDCGVSLVQRLDDKEETVRHRLKVYREKTQPVIDYYSKKGILARVDGSQEIRPIVAEVLGILGWSDK

SEQ ID NO: 2327 - DNA, 693 bp, synthetic construct
  misc_feature 1..693: note = variant of adenylate kinase from Thermotoga neapolitana
  source 1..693: mol_type = other DNA
atgcaccatcatcaccatcacgggggctccggcatgggggcatatctggtgttattaggtccgccgggcgcgggaaaaggtacccaaggccgtattatttcggcaaagactggcatcccgcatattagcacgggcgatatcctgcgtgacatcgtcgctaagcaaaacgatgaagttgcctcgagcattaaagagtggatgctgaaaggtgaactcgttccagatgaaattggtaatgcggtagtaaaacgccgcctgaaggagaaagactgcgaaaaaggctttattttggatggtttcccgcgtaccgtgcgccaagcggaatatctggatagttttcttgaaagccagggccgccagttgacagccgccgtgctgattgaggtccccgaagatgaagttgttgcacgtctgctgtctcgccgtatttgtccgaaatgcgggcgtagttacaacatgatttttctgccaccaaaagaagacgagctgtgtgacgattgcggtgtcagcttagtacagcgtttagatgataaggaagaaacggtccgtcaccgcctgaaagtctaccgtgagaagacccagccggtcattgactattatagtaagaaaggtattctcgcacgcgtagatgggagccaaggaatccggcctatcgtggcagaagtcctggggattctgggttggagcgataag

SEQ ID NO: 2328 - protein, 231 aa, synthetic construct
  REGION 1..231: note = variant of adenylate kinase from Thermotoga neapolitana
MHHHHHHGGSGMGAYLVLLGPPGAGKGTQGRIISAKTGIPHISTGDILRDIVAKQNDEVASSIKEWMLKGELVPDEIGNAVVKRRLKEKDCEKGFILDGFPRTVRQAEYLDSFLESQGRQLTAAVLIEVPEDEVVARLLSRRICPKCGRSYNMIFLPPKEDELCDDCGVSLVQRLDDKEETVRHRLKVYREKTQPVIDYYSKKGILARVDGSQGIRPIVAEVLGILGWSDK

SEQ ID NO: 2329 - DNA, 693 bp, synthetic construct
  misc_feature 1..693: note = variant of adenylate kinase from Thermotoga neapolitana
  source 1..693: mol_type = other DNA
atgcaccatcatcaccatcacgggggctccggcatgggggcatatctggtgttattaggtccgccgggcgcgggaaaaggtacccaaggccgtattatttcggcaaagactggcatcccgcatattagcacgggcgatatcctgcgtgacatcgtcgctaagcaaaacgatgaagttgcctcgagcattaaagagtggatgctgaaaggtgaactcgttccagatgaaattggtaatgcggtagtaaaacgccgcctgaaggagaaagactgcgaaaaaggctttattttggatggtttcccgcgtaccgtgcgccaagcggaatatctggatagttttcttgaaagccagggccgccagttgacagccgccgtgctgattgaggtccccgaagatgaagttgttgcacgtctgctgtctcgccgtatttgtccgaaatgcgggcgtagttacaacatgatttttgtgccaccaaaagaagatggactgtgtgacgattgcggtgtcagcttagtacagcgtttagatgataaggaagaaacggtccgtcaccgcctgaaagtctaccgtgagaagacccagccggtcattgactattatagtaagaaaggtattctcgcacgcgtagatgggagccaaggaatccggcctatcgtggcagaagtcctggggattctgggttggagcgataag

SEQ ID NO: 2330 - protein, 231 aa, synthetic construct
  REGION 1..231: note = variant of adenylate kinase from Thermotoga neapolitana
MHHHHHHGGSGMGAYLVLLGPPGAGKGTQGRIISAKTGIPHISTGDILRDIVAKQNDEVASSIKEWMLKGELVPDEIGNAVVKRRLKEKDCEKGFILDGFPRTVRQAEYLDSFLESQGRQLTAAVLIEVPEDEVVARLLSRRICPKCGRSYNMIFVPPKEDGLCDDCGVSLVQRLDDKEETVRHRLKVYREKTQPVIDYYSKKGILARVDGSQGIRPIVAEVLGILGWSDK

SEQ ID NO: 2331 - DNA, 693 bp, synthetic construct
  misc_feature 1..693: note = variant of adenylate kinase from Thermotoga neapolitana
  source 1..693: mol_type = other DNA
atgcaccatcatcaccatcacgggggctccggcatgggggcatatctggtgttattaggtccgccgggcgcgggaaaaggtacccaaggccgtattatttcggcaaagactggcatcccgcatattagcacgggcgatatcctgcgtgacatcgtcgctaagcaaaacgatgaagttgcctcgagcattaaagagtggatgctgaaaggtgaactcgttccagatgaacttggtaatgcggtagtaaaacgccgcctgaaggagaaagactgcgaaaaaggctttattttggatggtttcccgcgtaccgtgcgccaagcggaatatctggatagttttcttgaaagccagggccgccagttgacagccgccgtgctgattgaggtccccgaagatgaagttgttgcacgtctgctgtctcgccgtatttgtccgaaatgcgggcgtagttacaacatgatttttgtgccaccaaaagaactggaactgtgtgacgattgcggtgtcagcttagtacagcgtttagatgataaggaagaaacggtccgtcaccgcctgaaagtctaccgtgagaagacccagccggtcattgactattatagtaagaaaggtattctcgcacgcgtagatgggagccaagaaatcctgcctatcgtggcagaagtcctggggattctgggttggagcgataag

SEQ ID NO: 2332 - protein, 231 aa, synthetic construct
  REGION 1..231: note = variant of adenylate kinase from Thermotoga neapolitana
MHHHHHHGGSGMGAYLVLLGPPGAGKGTQGRIISAKTGIPHISTGDILRDIVAKQNDEVASSIKEWMLKGELVPDELGNAVVKRRLKEKDCEKGFILDGFPRTVRQAEYLDSFLESQGRQLTAAVLIEVPEDEVVARLLSRRICPKCGRSYNMIFVPPKELELCDDCGVSLVQRLDDKEETVRHRLKVYREKTQPVIDYYSKKGILARVDGSQEILPIVAEVLGILGWSDK

SEQ ID NO: 2333 - DNA, 693 bp, synthetic construct
  misc_feature 1..693: note = variant of adenylate kinase from Thermotoga neapolitana
  source 1..693: mol_type = other DNA
atgcaccatcatcaccatcacgggggctccggcatgggggcatatctggtgttattaggtccgccgggcgcgggaaaaggtacccaaggccgtattatttcggcaaagactggcatcccgcatattagcacgggcgatatcctgcgtgacatcgtcgctaagcaaaacgatgaagttgcctcgagcattaaagagtggatgctgaaaggtgaactcgttccagatgaaattggtaatgcggtagtaaaacgccgcctgaaggagaaagactgcgaaaaaggctttattttggatggtttcccgcgtaccgtgcgccaagcggaatatctggatagttttcttgaaagccagggccgccagttgacagccgccgtgctgattgaggtccccgaagatgaagttgttgcacgtctgctgtctcgccgtgtttgtccgaaatgcgggcgtagttacaacatgatttttctgccaccaaaagaagatggactgtgtgacgattgcggtgtcagcttagtacagcgtttagatgataaggaagaaacggtccgtcaccgcctgaaagtctaccgtgagaagacccagccggtcattgactattatagtaagaaaggtattctcgcacgcgtagatgggagccaatggatcctgcctatcgtggcagaagtcctggggattctgggttggagcgataag

SEQ ID NO: 2334 - protein, 231 aa, synthetic construct
  REGION 1..231: note = variant of adenylate kinase from Thermotoga neapolitana
MHHHHHHGGSGMGAYLVLLGPPGAGKGTQGRIISAKTGIPHISTGDILRDIVAKQNDEVASSIKEWMLKGELVPDEIGNAVVKRRLKEKDCEKGFILDGFPRTVRQAEYLDSFLESQGRQLTAAVLIEVPEDEVVARLLSRRVCPKCGRSYNMIFLPPKEDGLCDDCGVSLVQRLDDKEETVRHRLKVYREKTQPVIDYYSKKGILARVDGSQWILPIVAEVLGILGWSDK

SEQ ID NO: 2335 - DNA, 693 bp, synthetic construct
  misc_feature 1..693: note = variant of adenylate kinase from Thermotoga neapolitana
  source 1..693: mol_type = other DNA
atgcaccatcatcaccatcacgggggctccggcatgggggcatatctggtgttattaggtccgccgggcgcgggaaaaggtacccaaggccgtattatttcggcaaagactggcatcccgcatattagcacgggcgatatcctgcgtgacatcgtcgctaagcaaaacgatgaagttgcctcgagcattaaagagtggatgctgaaaggtgaactcgttccagatgaactgggtaatgcggtagtaaaacgccgcctgaaggagaaagactgcgaaaaaggctttattttggatggtttcccgcgtaccgtgcgccaagcggaatatctggatagttttcttgaaagccagggccgccagttgacagccgccgtgctgattgaggtccccgaagatgaagttgttgcacgtctgctgtctcgccgtgtttgtccgaaatgcgggcgtagttacaacatgatttttctgccaccaaaagaagacgagctgtgtgacgattgcggtgtcagcttagtacagcgtttagatgataaggaagaaacggtccgtcaccgcctgaaagtctaccgtgagaagacccagccggtcattgactattatagtaagaaaggtattctcgcacgcgtagatgggagccaaggaatcctgcctatcgtggcagaagtcctggggattctgggttggagcgataag

SEQ ID NO: 2336 - protein, 231 aa, synthetic construct
  REGION 1..231: note = variant of adenylate kinase from Thermotoga neapolitana
MHHHHHHGGSGMGAYLVLLGPPGAGKGTQGRIISAKTGIPHISTGDILRDIVAKQNDEVASSIKEWMLKGELVPDELGNAVVKRRLKEKDCEKGFILDGFPRTVRQAEYLDSFLESQGRQLTAAVLIEVPEDEVVARLLSRRVCPKCGRSYNMIFLPPKEDELCDDCGVSLVQRLDDKEETVRHRLKVYREKTQPVIDYYSKKGILARVDGSQGILPIVAEVLGILGWSDK

SEQ ID NO: 2337 - DNA, 693 bp, synthetic construct
  misc_feature 1..693: note = variant of adenylate kinase from Thermotoga neapolitana
  source 1..693: mol_type = other DNA
atgcaccatcatcaccatcacgggggctccggcatgggggcatatctggtgttattaggtccgccgggcgcgggaaaaggtacccaaggccgtattatttcggcaaagactggcatcccgcatattagcacgggcgatatcctgcgtgacatcgtcgctaagcaaaacgatgaagttgcctcgagcattaaagagtggatgctgaaaggtgaactcgttccagatgaacttggtaatgcggtagtaaaacgccgcctgaaggagaaagactgcgaaaaaggctttattttggatggtttcccgcgtaccgtgcgccaagcggaatatctggatagttttcttgaaagccagggccgccagttgacagccgccgtgctgattgaggtccccgaagatgaagttgttgcacgtctgctgtctcgccgtatttgtccgaaatgcgggcgtagttacaacatgatttttctgccaccaaaagaagacgagctgtgtgacgattgcggtgtcagcttagtacagcgtttagatgataaggaagaaacggtccgtcaccgcctgaaagtctaccgtgagaagacccagccggtcattgactattatagtaagaaaggtattctcgcacgcgtagatgggagccaagaaatcctgcctatcgtggcagaagtcctggggattctgggttggagcgataag

SEQ ID NO: 2338 - protein, 231 aa, synthetic construct
  REGION 1..231: note = variant of adenylate kinase from Thermotoga neapolitana
MHHHHHHGGSGMGAYLVLLGPPGAGKGTQGRIISAKTGIPHISTGDILRDIVAKQNDEVASSIKEWMLKGELVPDELGNAVVKRRLKEKDCEKGFILDGFPRTVRQAEYLDSFLESQGRQLTAAVLIEVPEDEVVARLLSRRICPKCGRSYNMIFLPPKEDELCDDCGVSLVQRLDDKEETVRHRLKVYREKTQPVIDYYSKKGILARVDGSQEILPIVAEVLGILGWSDK

SEQ ID NO: 2339 - DNA, 693 bp, synthetic construct
  misc_feature 1..693: note = variant of adenylate kinase from Thermotoga neapolitana
  source 1..693: mol_type = other DNA
atgcaccatcatcaccatcacgggggctccggcatgggggcatatctggtgttattaggtccgccgggcgcgggaaaaggtacccaaggccgtattatttcggcaaagactggcatcccgcatattagcacgggcgatatcctgcgtgacatcgtcgctaagcaaaacgatgaagttgcctcgagcattaaagagtggatgctgaaaggtgaactcgttccagatgaacttggtaatgcggtagtaaaacgccgcctgaaggagaaagactgcgaaaaaggctttattttggatggtttcccgcgtaccgtgcgccaagcggaatatctggatagttttcttgaaagccagggccgccagttgacagccgccgtgctgattgaggtccccgaagatgaagttgttgcacgtctgctgtctcgccgtgtttgtccgaaatgcgggcgtagttacaacatgatttttgtgccaccaaaagaagatgaactgtgtgacgattgcggtgtcagcttagtacagcgtttagatgataaggaagaaacggtccgtcaccgcctgaaagtctaccgtgagaagacccagccggtcattgactattatagtaagaaaggtattctcgcacgcgtagatgggagccaagaaatccggcctatcgtggcagaagtcctggggattctgggttggagcgataag

SEQ ID NO: 2340 - protein, 231 aa, synthetic construct
  REGION 1..231: note = variant of adenylate kinase from Thermotoga neapolitana
MHHHHHHGGSGMGAYLVLLGPPGAGKGTQGRIISAKTGIPHISTGDILRDIVAKQNDEVASSIKEWMLKGELVPDELGNAVVKRRLKEKDCEKGFILDGFPRTVRQAEYLDSFLESQGRQLTAAVLIEVPEDEVVARLLSRRVCPKCGRSYNMIFVPPKEDELCDDCGVSLVQRLDDKEETVRHRLKVYREKTQPVIDYYSKKGILARVDGSQEIRPIVAEVLGILGWSDK

SEQ ID NO: 2341 - DNA, 693 bp, synthetic construct
  misc_feature 1..693: note = variant of adenylate kinase from Thermotoga neapolitana
  source 1..693: mol_type = other DNA
atgcaccatcatcaccatcacgggggctccggcatgggggcatatctggtgttattaggtccgccgggcgcgggaaaaggtacccaaggccgtattatttcggcaaagactggcatcccgcatattagcacgggcgatatcctgcgtgacatcgtcgctaagcaaaacgatgaagttgcctcgagcattaaagagtggatgctgaaaggtgaactcgttccagatgaactgggtaatgcggtagtaaaacgccgcctgaaggagaaagactgcgaaaaaggctttattttggatggtttcccgcgtaccgtgcgccaagcggaatatctggatagttttcttgaaagccagggccgccagttgacagccgccgtgctgattgaggtccccgaagatgaagttgttgcacgtctgctgtctcgccgtgtttgtccgaaatgcgggcgtagttacaacatgatttttctgccaccaaaagaagacgagctgtgtgacgattgcggtgtcagcttagtacagcgtttagatgataaggaagaaacggtccgtcaccgcctgaaagtctaccgtgagaagacccagccggtcattgactattatagtaagaaaggtattctcgcacgcgtagatgggagccaagaaatcctgcctatcgtggcagaagtcctggggattctgggttggagcgataag

SEQ ID NO: 2342 - protein, 231 aa, synthetic construct
  REGION 1..231: note = variant of adenylate kinase from Thermotoga neapolitana
MHHHHHHGGSGMGAYLVLLGPPGAGKGTQGRIISAKTGIPHISTGDILRDIVAKQNDEVASSIKEWMLKGELVPDELGNAVVKRRLKEKDCEKGFILDGFPRTVRQAEYLDSFLESQGRQLTAAVLIEVPEDEVVARLLSRRVCPKCGRSYNMIFLPPKEDELCDDCGVSLVQRLDDKEETVRHRLKVYREKTQPVIDYYSKKGILARVDGSQEILPIVAEVLGILGWSDK

SEQ ID NO: 2343 - DNA, 693 bp, synthetic construct
  misc_feature 1..693: note = variant of adenylate kinase from Thermotoga neapolitana
  source 1..693: mol_type = other DNA
atgcaccatcatcaccatcacgggggctccggcatgggggcatatctggtgttattaggtccgccgggcgcgggaaaaggtacccaaggccgtattatttcggcaaagactggcatcccgcatattagcacgggcgatatcctgcgtgacatcgtcgctaagcaaaacgatgaagttgcctcgagcattaaagagtggatgctgaaaggtgaactcgttccagatgaactgggtaatgcggtagtaaaacgccgcctgaaggagaaagactgcgaaaaaggctttattttggatggtttcccgcgtaccgtgcgccaagcggaatatctggatagttttcttgaaagccagggccgccagttgacagccgccgtgctgattgaggtccccgaagatgaagttgttgcacgtctgctgtctcgccgtgtttgtccgaaatgcgggcgtagttacaacatgatttttctgccaccaaaagaagacgagctgtgtgacgattgcggtgtcagcttagtacagcgtttagatgataaggaagaaacggtccgtcaccgcctgaaagtctaccgtgagaagacccagccggtcattgactattatagtaagaaaggtattctcgcacgcgtagatgggagccaagaaatccggcctatcgtggcagaagtcctggggattctgggttggagcgataag

SEQ ID NO: 2344 - protein, 231 aa, synthetic construct
  REGION 1..231: note = variant of adenylate kinase from Thermotoga neapolitana
MHHHHHHGGSGMGAYLVLLGPPGAGKGTQGRIISAKTGIPHISTGDILRDIVAKQNDEVASSIKEWMLKGELVPDELGNAVVKRRLKEKDCEKGFILDGFPRTVRQAEYLDSFLESQGRQLTAAVLIEVPEDEVVARLLSRRVCPKCGRSYNMIFLPPKEDELCDDCGVSLVQRLDDKEETVRHRLKVYREKTQPVIDYYSKKGILARVDGSQEIRPIVAEVLGILGWSDK

SEQ ID NO: 2345 - DNA, 693 bp, synthetic construct
  misc_feature 1..693: note = variant of adenylate kinase from Thermotoga neapolitana
  source 1..693: mol_type = other DNA
atgcaccatcatcaccatcacgggggctccggcatgggggcatatctggtgttattaggtccgccgggcgcgggaaaaggtacccaaggccgtattatttcggcaaagactggcatcccgcatattagcacgggcgatatcctgcgtgacatcgtcgctaagcaaaacgatgaagttgcctcgagcattaaagagtggatgctgaaaggtgaactcgttccagatgaactgggtaatgcggtagtaaaacgccgcctgaaggagaaagactgcgaaaaaggctttattttggatggtttcccgcgtaccgtgcgccaagcggaatatctggatagttttcttgaaagccagggccgccagttgacagccgccgtgctgattgaggtccccgaagatgaagttgttgcacgtctgctgtctcgccgtatttgtccgaaatgcgggcgtagttacaacatgatttttctgccaccaaaagaagatgaactgtgtgacgattgcggtgtcagcttagtacagcgtttagatgataaggaagaaacggtccgtcaccgcctgaaagtctaccgtgagaagacccagccggtcattgactattatagtaagaaaggtattctcgcacgcgtagatgggagccaagaaatcccgcctatcgtggcagaagtcctggggattctgggttggagcgataag

SEQ ID NO: 2346 - protein, 231 aa, synthetic construct
  REGION 1..231: note = variant of adenylate kinase from Thermotoga neapolitana
MHHHHHHGGSGMGAYLVLLGPPGAGKGTQGRIISAKTGIPHISTGDILRDIVAKQNDEVASSIKEWMLKGELVPDELGNAVVKRRLKEKDCEKGFILDGFPRTVRQAEYLDSFLESQGRQLTAAVLIEVPEDEVVARLLSRRICPKCGRSYNMIFLPPKEDELCDDCGVSLVQRLDDKEETVRHRLKVYREKTQPVIDYYSKKGILARVDGSQEIPPIVAEVLGILGWSDK

SEQ ID NO: 2347 - DNA, 693 bp, synthetic construct
  misc_feature 1..693: note = variant of adenylate kinase from Thermotoga neapolitana
  source 1..693: mol_type = other DNA
atgcaccatcatcaccatcacgggggctccggcatgggggcatatctggtgttattaggtccgccgggcgcgggaaaaggtacccaaggccgtattatttcggcaaagactggcatcccgcatattagcacgggcgatatcctgcgtgacatcgtcgctaagcaaaacgatgaagttgcctcgagcattaaagagtggatgctgaaaggtgaactcgttccagatgaaattggtaatgcggtagtaaaacgccgcctgaaggagaaagactgcgaaaaaggctttattttggatggtttcccgcgtaccgtgcgccaagcggaatatctggatagttttcttgaaagccagggccgccagttgacagccgccgtgctgattgaggtccccgaagatgaagttgttgcacgtctgctgtctcgccgtgtttgtccgaaatgcgggcgtagttacaacatgatttttctgccaccaaaagaagacgagctgtgtgacgattgcggtgtcagcttagtacagcgtttagatgataaggaagaaacggtccgtcaccgcctgaaagtctaccgtgagaagacccagccggtcattgactattatagtaagaaaggtattctcgcacgcgtagatgggcagcaaggaatccggcctatcgtggcagaagtcctggggattctgggttggagcgataag

SEQ ID NO: 2348 - protein, 231 aa, synthetic construct
  REGION 1..231: note = variant of adenylate kinase from Thermotoga neapolitana
MHHHHHHGGSGMGAYLVLLGPPGAGKGTQGRIISAKTGIPHISTGDILRDIVAKQNDEVASSIKEWMLKGELVPDEIGNAVVKRRLKEKDCEKGFILDGFPRTVRQAEYLDSFLESQGRQLTAAVLIEVPEDEVVARLLSRRVCPKCGRSYNMIFLPPKEDELCDDCGVSLVQRLDDKEETVRHRLKVYREKTQPVIDYYSKKGILARVDGQQGIRPIVAEVLGILGWSDK

SEQ ID NO: 2349 - DNA, 693 bp, synthetic construct
  misc_feature 1..693: note = variant of adenylate kinase from Thermotoga neapolitana
  source 1..693: mol_type = other DNA
atgcaccatcatcaccatcacgggggctccggcatgggggcatatctggtgttattaggtccgccgggcgcgggaaaaggtacccaaggccgtattatttcggcaaagactggcatcccgcatattagcacgggcgatatcctgcgtgacatcgtcgctaagcaaaacgatgaagttgcctcgagcattaaagagtggatgctgaaaggtgaactcgttccagatgaacttggtaatgcggtagtaaaacgccgcctgaaggagaaagactgcgaaaaaggctttattttggatggtttcccgcgtaccgtgcgccaagcggaatatctggatagttttcttgaaagccagggccgccagttgacagccgccgtgctgattgaggtccccgaagatgaagttgttgcacgtctgctgtctcgccgtgtttgtccgaaatgcgggcgtagttacaacatgatttttgtgccaccaaaagaactgggactgtgtgacgattgcggtgtcagcttagtacagcgtttagatgataaggaagaaacggtccgtcaccgcctgaaagtctaccgtgagaagacccagccggtcattgactattatagtaagaaaggtattctcgcacgcgtagatgggagccaaggaatccggcctatcgtggcagaagtcctggggattctgggttggagcgataag

SEQ ID NO: 2350 - protein, 231 aa, synthetic construct
  REGION 1..231: note = variant of adenylate kinase from Thermotoga neapolitana
MHHHHHHGGSGMGAYLVLLGPPGAGKGTQGRIISAKTGIPHISTGDILRDIVAKQNDEVASSIKEWMLKGELVPDELGNAVVKRRLKEKDCEKGFILDGFPRTVRQAEYLDSFLESQGRQLTAAVLIEVPEDEVVARLLSRRVCPKCGRSYNMIFVPPKELGLCDDCGVSLVQRLDDKEETVRHRLKVYREKTQPVIDYYSKKGILARVDGSQGIRPIVAEVLGILGWSDK

SEQ ID NO: 2351 - DNA, 693 bp, synthetic construct
  misc_feature 1..693: note = variant of adenylate kinase from Thermotoga neapolitana
  source 1..693: mol_type = other DNA
atgcaccatcatcaccatcacgggggctccggcatgggggcatatctggtgttattaggtccgccgggcgcgggaaaaggtacccaaggccgtattatttcggcaaagactggcatcccgcatattagcacgggcgatatcctgcgtgacatcgtcgctaagcaaaacgatgaagttgcctcgagcattaaagagtggatgctgaaaggtgaactcgttccagatgaactgggtaatgcggtagtaaaacgccgcctgaaggagaaagactgcgaaaaaggctttattttggatggtttcccgcgtaccgtgcgccaagcggaatatctggatagttttcttgaaagccagggccgccagttgacagccgccgtgctgattgaggtccccgaagatgaagttgttgcacgtctgctgtctcgccgtatttgtccgaaatgcgggcgtagttacaacatgatttttgtgccaccaaaagaagatggactgtgtgacgattgcggtgtcagcttagtacagcgtttagatgataaggaagaaacggtccgtcaccgcctgaaagtctaccgtgagaagacccagccggtcattgactattatagtaagaaaggtattctcgcacgcgtagatgggagccaagaaatcccgcctatcgtggcagaagtcctggggattctgggttggagcgataag

SEQ ID NO: 2352 - protein, 231 aa, synthetic construct
  REGION 1..231: note = variant of adenylate kinase from Thermotoga neapolitana
MHHHHHHGGSGMGAYLVLLGPPGAGKGTQGRIISAKTGIPHISTGDILRDIVAKQNDEVASSIKEWMLKGELVPDELGNAVVKRRLKEKDCEKGFILDGFPRTVRQAEYLDSFLESQGRQLTAAVLIEVPEDEVVARLLSRRICPKCGRSYNMIFVPPKEDGLCDDCGVSLVQRLDDKEETVRHRLKVYREKTQPVIDYYSKKGILARVDGSQEIPPIVAEVLGILGWSDK

SEQ ID NO: 2353 - DNA, 693 bp, synthetic construct
  misc_feature 1..693: note = variant of adenylate kinase from Thermotoga neapolitana
  source 1..693: mol_type = other DNA
atgcaccatcatcaccatcacgggggctccggcatgggggcatatctggtgttattaggtccgccgggcgcgggaaaaggtacccaaggccgtattatttcggcaaagactggcatcccgcatattagcacgggcgatatcctgcgtgacatcgtcgctaagcaaaacgatgaagttgcctcgagcattaaagagtggatgctgaaaggtgaactcgttccagatgaaattggtaatgcggtagtaaaacgccgcctgaaggagaaagactgcgaaaaaggctttattttggatggtttcccgcgtaccgtgcgccaagcggaatatctggatagttttcttgaaagccagggccgccagttgacagccgccgtgctgattgaggtccccgaagatgaagttgttgcacgtctgctgtctcgccgtgtttgtccgaaatgcgggcgtagttacaacatgatttttgtgccaccaaaagaactgggactgtgtgacgattgcggtgtcagcttagtacagcgtttagatgataaggaagaaacggtccgtcaccgcctgaaagtctaccgtgagaagacccagccggtcattgactattatagtaagaaaggtattctcgcacgcgtagatgggagccaaggaatcccgcctatcgtggcagaagtcctggggattctgggttggagcgataag

SEQ ID NO: 2354 - protein, 231 aa, synthetic construct
  REGION 1..231: note = variant of adenylate kinase from Thermotoga neapolitana
MHHHHHHGGSGMGAYLVLLGPPGAGKGTQGRIISAKTGIPHISTGDILRDIVAKQNDEVASSIKEWMLKGELVPDEIGNAVVKRRLKEKDCEKGFILDGFPRTVRQAEYLDSFLESQGRQLTAAVLIEVPEDEVVARLLSRRVCPKCGRSYNMIFVPPKELGLCDDCGVSLVQRLDDKEETVRHRLKVYREKTQPVIDYYSKKGILARVDGSQGIPPIVAEVLGILGWSDK

SEQ ID NO: 2355 - DNA, 693 bp, synthetic construct
  misc_feature 1..693: note = variant of adenylate kinase from Thermotoga neapolitana
  source 1..693: mol_type = other DNA
atgcaccatcatcaccatcacgggggctccggcatgggggcatatctggtgttattaggtccgccgggcgcgggaaaaggtacccaaggccgtattatttcggcaaagactggcatcccgcatattagcacgggcgatatcctgcgtgacatcgtcgctaagcaaaacgatgaagttgcctcgagcattaaagagtggatgctgaaaggtgaactcgttccagatgaacttggtaatgcggtagtaaaacgccgcctgaaggagaaagactgcgaaaaaggctttattttggatggtttcccgcgtaccgtgcgccaagcggaatatctggatagttttcttgaaagccagggccgccagttgacagccgccgtgctgattgaggtccccgaagatgaagttgttgcacgtctgctgtctcgccgtgtttgtccgaaatgcgggcgtagttacaacatgatttttctgccaccaaaagaactggaactgtgtgacgattgcggtgtcagcttagtacagcgtttagatgataaggaagaaacggtccgtcaccgcctgaaagtctaccgtgagaagacccagccggtcattgactattatagtaagaaaggtattctcgcacgcgtagatgggagccaagaaatccggcctatcgtggcagaagtcctggggattctgggttggagcgataag

SEQ ID NO: 2356 - protein, 231 aa, synthetic construct
  REGION 1..231: note = variant of adenylate kinase from Thermotoga neapolitana
MHHHHHHGGSGMGAYLVLLGPPGAGKGTQGRIISAKTGIPHISTGDILRDIVAKQNDEVASSIKEWMLKGELVPDELGNAVVKRRLKEKDCEKGFILDGFPRTVRQAEYLDSFLESQGRQLTAAVLIEVPEDEVVARLLSRRVCPKCGRSYNMIFLPPKELELCDDCGVSLVQRLDDKEETVRHRLKVYREKTQPVIDYYSKKGILARVDGSQEIRPIVAEVLGILGWSDK

SEQ ID NO: 2357 - DNA, 693 bp, synthetic construct
  misc_feature 1..693: note = variant of adenylate kinase from Thermotoga neapolitana
  source 1..693: mol_type = other DNA
atgcaccatcatcaccatcacgggggctccggcatgggggcatatctggtgttattaggtccgccgggcgcgggaaaaggtacccaaggccgtattatttcggcaaagactggcatcccgcatattagcacgggcgatatcctgcgtgacatcgtcgctaagcaaaacgatgaagttgcctcgagcattaaagagtggatgctgaaaggtgaactcgttccagatgaaattggtaatgcggtagtaaaacgccgcctgaaggagaaagactgcgaaaaaggctttattttggatggtttcccgcgtaccgtgcgccaagcggaatatctggatagttttcttgaaagccagggccgccagttgacagccgccgtgctgattgaggtccccgaagatgaagttgttgcacgtctgctgtctcgccgtatttgtccgaaatgcgggcgtagttacaacatgatttttctgccaccaaaagaactggaactgtgtgacgattgcggtgtcagcttagtacagcgtttagatgataaggaagaaacggtccgtcaccgcctgaaagtctaccgtgagaagacccagccggtcattgactattatagtaagaaaggtattctcgcacgcgtagatgggagccaaggaatccggcctatcgtggcagaagtcctggggattctgggttggagcgataag

SEQ ID NO: 2358 - protein, 231 aa, synthetic construct
  REGION 1..231: note = variant of adenylate kinase from Thermotoga neapolitana
MHHHHHHGGSGMGAYLVLLGPPGAGKGTQGRIISAKTGIPHISTGDILRDIVAKQNDEVASSIKEWMLKGELVPDEIGNAVVKRRLKEKDCEKGFILDGFPRTVRQAEYLDSFLESQGRQLTAAVLIEVPEDEVVARLLSRRICPKCGRSYNMIFLPPKELELCDDCGVSLVQRLDDKEETVRHRLKVYREKTQPVIDYYSKKGILARVDGSQGIRPIVAEVLGILGWSDK

SEQ ID NO: 2359 - DNA, 693 bp, synthetic construct
  misc_feature 1..693: note = variant of adenylate kinase from Thermotoga neapolitana
  source 1..693: mol_type = other DNA
atgcaccatcatcaccatcacgggggctccggcatgggggcatatctggtgttattaggtccgccgggcgcgggaaaaggtacccaaggccgtattatttcggcaaagactggcatcccgcatattagcacgggcgatatcctgcgtgacatcgtcgctaagcaaaacgatgaagttgcctcgagcattaaagagtggatgctgaaaggtgaactcgttccagatgaacttggtaatgcggtagtaaaacgccgcctgaaggagaaagactgcgaaaaaggctttattttggatggtttcccgcgtaccgtgcgccaagcggaatatctggatagttttcttgaaagccagggccgccagttgacagccgccgtgctgattgaggtccccgaagatgaagttgttgcacgtctgctgtctcgccgtgtttgtccgaaatgcgggcgtagttacaacatgatttttctgccaccaaaagaagatgaactgtgtgacgattgcggtgtcagcttagtacagcgtttagatgataaggaagaaacggtccgtcaccgcctgaaagtctaccgtgagaagacccagccggtcattgactattatagtaagaaaggtattctcgcacgcgtagatgggcagcaagaaatccggcctatcgtggcagaagtcctggggattctgggttggagcgataag

SEQ ID NO: 2360 - protein, 231 aa, synthetic construct
  REGION 1..231: note = variant of adenylate kinase from Thermotoga neapolitana
MHHHHHHGGSGMGAYLVLLGPPGAGKGTQGRIISAKTGIPHISTGDILRDIVAKQNDEVASSIKEWMLKGELVPDELGNAVVKRRLKEKDCEKGFILDGFPRTVRQAEYLDSFLESQGRQLTAAVLIEVPEDEVVARLLSRRVCPKCGRSYNMIFLPPKEDELCDDCGVSLVQRLDDKEETVRHRLKVYREKTQPVIDYYSKKGILARVDGQQEIRPIVAEVLGILGWSDK

SEQ ID NO: 2361 - DNA, 693 bp, synthetic construct
  misc_feature 1..693: note = variant of adenylate kinase from Thermotoga neapolitana
  source 1..693: mol_type = other DNA
atgcaccatcatcaccatcacgggggctccggcatgggggcatatctggtgttattaggtccgccgggcgcgggaaaaggtacccaaggccgtattatttcggcaaagactggcatcccgcatattagcacgggcgatatcctgcgtgacatcgtcgctaagcaaaacgatgaagttgcctcgagcattaaagagtggatgctgaaaggtgaactcgttccagatgaaattggtaatgcggtagtaaaacgccgcctgaaggagaaagactgcgaaaaaggctttattttggatggtttcccgcgtaccgtgcgccaagcggaatatctggatagttttcttgaaagccagggccgccagttgacagccgccgtgctgattgaggtccccgaagatgaagttgttgcacgtctgctgtctcgccgtgtttgtccgaaatgcgggcgtagttacaacatgatttttctgccaccaaaagaagatgaactgtgtgacgattgcggtgtcagcttagtacagcgtttagatgataaggaagaaacggtccgtcaccgcctgaaagtctaccgtgagaagacccagccggtcattgactattatagtaagaaaggtattctcgcacgcgtagatgggagccaatggatccggcctatcgtggcagaagtcctggggattctgggttggagcgataag

SEQ ID NO: 2362 - protein, 231 aa, synthetic construct
  REGION 1..231: note = variant of adenylate kinase from Thermotoga neapolitana
MHHHHHHGGSGMGAYLVLLGPPGAGKGTQGRIISAKTGIPHISTGDILRDIVAKQNDEVASSIKEWMLKGELVPDEIGNAVVKRRLKEKDCEKGFILDGFPRTVRQAEYLDSFLESQGRQLTAAVLIEVPEDEVVARLLSRRVCPKCGRSYNMIFLPPKEDELCDDCGVSLVQRLDDKEETVRHRLKVYREKTQPVIDYYSKKGILARVDGSQWIRPIVAEVLGILGWSDK

SEQ ID NO: 2363 - DNA, 693 bp, synthetic construct
  misc_feature 1..693: note = variant of adenylate kinase from Thermotoga neapolitana
  source 1..693: mol_type = other DNA
atgcaccatcatcaccatcacgggggctccggcatgggggcatatctggtgttattaggtccgccgggcgcgggaaaaggtacccaaggccgtattatttcggcaaagactggcatcccgcatattagcacgggcgatatcctgcgtgacatcgtcgctaagcaaaacgatgaagttgcctcgagcattaaagagtggatgctgaaaggtgaactcgttccagatgaacttggtaatgcggtagtaaaacgccgcctgaaggagaaagactgcgaaaaaggctttattttggatggtttcccgcgtaccgtgcgccaagcggaatatctggatagttttcttgaaagccagggccgccagttgacagccgccgtgctgattgaggtccccgaagatgaagttgttgcacgtctgctgtctcgccgtgtttgtccgaaatgcgggcgtagttacaacatgatttttctgccaccaaaagaagatgaactgtgtgacgattgcggtgtcagcttagtacagcgtttagatgataaggaagaaacggtccgtcaccgcctgaaagtctaccgtgagaagacccagccggtcattgactattatagtaagaaaggtattctcgcacgcgtagatgggagccaaggaatccggcctatcgtggcagaagtcctggggattctgggttggagcgataag

SEQ ID NO: 2364 - protein, 231 aa, synthetic construct
  REGION 1..231: note = variant of adenylate kinase from Thermotoga neapolitana
MHHHHHHGGSGMGAYLVLLGPPGAGKGTQGRIISAKTGIPHISTGDILRDIVAKQNDEVASSIKEWMLKGELVPDELGNAVVKRRLKEKDCEKGFILDGFPRTVRQAEYLDSFLESQGRQLTAAVLIEVPEDEVVARLLSRRVCPKCGRSYNMIFLPPKEDELCDDCGVSLVQRLDDKEETVRHRLKVYREKTQPVIDYYSKKGILARVDGSQGIRPIVAEVLGILGWSDK

SEQ ID NO: 2365 - DNA, 693 bp, synthetic construct
  misc_feature 1..693: note = variant of adenylate kinase from Thermotoga neapolitana
  source 1..693: mol_type = other DNA
atgcaccatcatcaccatcacgggggctccggcatgggggcatatctggtgttattaggtccgccgggcgcgggaaaaggtacccaaggccgtattatttcggcaaagactggcatcccgcatattagcacgggcgatatcctgcgtgacatcgtcgctaagcaaaacgatgaagttgcctcgagcattaaagagtggatgctgaaaggtgaactcgttccagatgaactgggtaatgcggtagtaaaacgccgcctgaaggagaaagactgcgaaaaaggctttattttggatggtttcccgcgtaccgtgcgccaagcggaatatctggatagttttcttgaaagccagggccgccagttgacagccgccgtgctgattgaggtccccgaagatgaagttgttgcacgtctgctgtctcgccgtatttgtccgaaatgcgggcgtagttacaacatgatttttctgccaccaaaagaagacgagctgtgtgacgattgcggtgtcagcttagtacagcgtttagatgataaggaagaaacggtccgtcaccgcctgaaagtctaccgtgagaagacccagccggtcattgactattatagtaagaaaggtattctcgcacgcgtagatgggagccaaggaatccggcctatcgtggcagaagtcctggggattctgggttggagcgataag

SEQ ID NO: 2366 - protein, 231 aa, synthetic construct
  REGION 1..231: note = variant of adenylate kinase from Thermotoga neapolitana
MHHHHHHGGSGMGAYLVLLGPPGAGKGTQGRIISAKTGIPHISTGDILRDIVAKQNDEVASSIKEWMLKGELVPDELGNAVVKRRLKEKDCEKGFILDGFPRTVRQAEYLDSFLESQGRQLTAAVLIEVPEDEVVARLLSRRICPKCGRSYNMIFLPPKEDELCDDCGVSLVQRLDDKEETVRHRLKVYREKTQPVIDYYSKKGILARVDGSQGIRPIVAEVLGILGWSDK

SEQ ID NO: 2367 - DNA, 693 bp, synthetic construct
  misc_feature 1..693: note = variant of adenylate kinase from Thermotoga neapolitana
  source 1..693: mol_type = other DNA
atgcaccatcatcaccatcacgggggctccggcatgggggcatatctggtgttattaggtccgccgggcgcgggaaaaggtacccaaggccgtattatttcggcaaagactggcatcccgcatattagcacgggcgatatcctgcgtgacatcgtcgctaagcaaaacgatgaagttgcctcgagcattaaagagtggatgctgaaaggtgaactcgttccagatgaaattggtaatcctgtagtaaaacgccgcctgaaggagaaagactgcgaaaaaggctttattttggatggtttcccgcgtaccgtgcgccaagcggaatatctggatagttttcttgaaagccagggccgccagttgacagccgccgtgctgattgaggtccccgaagatgaagttgttgcacgtctgctgtctcgccgtgtttgtccgaaatgcgggcgtagttacaacatgatttttctgccaccaaaagaagacgagctgtgtgacgattgcggtgtcagcttagtacagcgtttagatgataaggaagaaacggtccgtcaccgcctgaaagtctaccgtgagaagacccagccggtcattgactattatagtaagaaaggtattctcgcacgcgtagatgggagccaagaaatccggcctatcgtggcagaagtcctggggattctgggttggagcgataag

SEQ ID NO: 2368 - protein, 231 aa, synthetic construct
  REGION 1..231: note = variant of adenylate kinase from Thermotoga neapolitana
MHHHHHHGGSGMGAYLVLLGPPGAGKGTQGRIISAKTGIPHISTGDILRDIVAKQNDEVASSIKEWMLKGELVPDEIGNPVVKRRLKEKDCEKGFILDGFPRTVRQAEYLDSFLESQGRQLTAAVLIEVPEDEVVARLLSRRVCPKCGRSYNMIFLPPKEDELCDDCGVSLVQRLDDKEETVRHRLKVYREKTQPVIDYYSKKGILARVDGSQEIRPIVAEVLGILGWSDK

SEQ ID NO: 2369 - DNA, 693 bp, synthetic construct
  misc_feature 1..693: note = variant of adenylate kinase from Thermotoga neapolitana
  source 1..693: mol_type = other DNA
atgcaccatcatcaccatcacgggggctccggcatgggggcatatctggtgttattaggtccgccgggcgcgggaaaaggtacccaaggccgtattatttcggcaaagactggcatcccgcatattagcacgggcgatatcctgcgtgacatcgtcgctaagcaaaacgatgaagttgcctcgagcattaaagagtggatgctgaaaggtgaactcgttccagatgaaattggtaatgcggtagtaaaacgccgcctgaaggagaaagactgcgaaaaaggctttattttggatggtttcccgcgtaccgtgaagcaagcggaatatctggatagttttcttgaaagccagggccgccagttgacagccgccgtgctgattgaggtccccgaagatgaagttgttgcacgtctgctgtctcgccgtgtttgtccgaaatgcgggcgtagttacaacatgatttttctgccaccaaaagaagacgagctgtgtgacgattgcggtgtcagcttagtacagcgtttagatgataaggaagaaacggtccgtcaccgcctgaaagtctaccgtgagaagacccagccggtcattgactattatagtaagaaaggtattctcgcacgcgtagatgggagccaagaaatccggcctatcgtggcagaagtcctggggattctgggttggagcgataag

SEQ ID NO: 2370 - protein, 231 aa, synthetic construct
  REGION 1..231: note = variant of adenylate kinase from Thermotoga neapolitana
MHHHHHHGGSGMGAYLVLLGPPGAGKGTQGRIISAKTGIPHISTGDILRDIVAKQNDEVASSIKEWMLKGELVPDEIGNAVVKRRLKEKDCEKGFILDGFPRTVKQAEYLDSFLESQGRQLTAAVLIEVPEDEVVARLLSRRVCPKCGRSYNMIFLPPKEDELCDDCGVSLVQRLDDKEETVRHRLKVYREKTQPVIDYYSKKGILARVDGSQEIRPIVAEVLGILGWSDK

SEQ ID NO: 2371 - DNA, 693 bp, synthetic construct
  misc_feature 1..693: note = variant of adenylate kinase from Thermotoga neapolitana
  source 1..693: mol_type = other DNA
atgcaccatcatcaccatcacgggggctccggcatgggggcatatctggtgttattaggtccgccgggcgcgggaaaaggtacccaaggccgtattatttcggcaaagactggcatcccgcatattagcacgggcgatatcctgcgtgacatcgtcgctaagcaaaacgatgaagttgcctcgagcattaaagagtggatgctgaaaggtgaactcgttccagatgaaattggtaatgcggtagtaaaacgccgcctgaaggagaaagactgcgaaaaaggctttattttggatggtttcccgcgtaccgtgcgccaagcggaatatctggatagttttcttgaaagccagggccgccagttgacagccgccgtgctgattgaggtccccgaagatgaagttgttgcacgtctgctgtctcgccgtgtttgtccgaaatgcgggcgtagttacaacatgatttttctgccaccaaaagaagacgagctgtgtgacgattgcggtgtcagcttagtacagcgtttagatgataaggaagaaacggtccgtcaccgcctgaaagtctaccgtgagaagacccagccggtcattgactattatagtaagaaaggtattctcgcacgcgtagatgggagccaagaaatccggcctatcgtggcagaagtcctggggattctgggttcgagcgataag

SEQ ID NO: 2372 - protein, 231 aa, synthetic construct
  REGION 1..231: note = variant of adenylate kinase from Thermotoga neapolitana
MHHHHHHGGSGMGAYLVLLGPPGAGKGTQGRIISAKTGIPHISTGDILRDIVAKQNDEVASSIKEWMLKGELVPDEIGNAVVKRRLKEKDCEKGFILDGFPRTVRQAEYLDSFLESQGRQLTAAVLIEVPEDEVVARLLSRRVCPKCGRSYNMIFLPPKEDELCDDCGVSLVQRLDDKEETVRHRLKVYREKTQPVIDYYSKKGILARVDGSQEIRPIVAEVLGILGSSDK

SEQ ID NO: 2373 - DNA, 693 bp, synthetic construct
  misc_feature 1..693: note = variant of adenylate kinase from Thermotoga neapolitana
  source 1..693: mol_type = other DNA
atgcaccatcatcaccatcacgggggctccggcatgggggcatatctggtgttattaggtccgccgggcgcgggaaaaggtacccaaggccgtattatttcggcaaagactggcatcccgcatattagcacgggcgatatcctgcgtcagatcgtcgctaagcaaaacgatgaagttgcctcgagcattaaagagtggatgctgaaaggtgaactcgttccagatgaaattggtaatgcggtagtaaaacgccgcctgaaggagaaagactgcgaaaaaggctttattttggatggtttcccgcgtaccgtgcgccaagcggaatatctggatagttttcttgaaagccagggccgccagttgacagccgccgtgctgattgaggtccccgaagatgaagttgttgcacgtctgctgtctcgccgtgtttgtccgaaatgcgggcgtagttacaacatgatttttctgccaccaaaagaagacgagctgtgtgacgattgcggtgtcagcttagtacagcgtttagatgataaggaagaaacggtccgtcaccgcctgaaagtctaccgtgagaagacccagccggtcattgactattatagtaagaaaggtattctcgcacgcgtagatgggagccaagaaatccggcctatcgtggcagaagtcctggggattctgggttggagcgataag

SEQ ID NO: 2374 - protein, 231 aa, synthetic construct
  REGION 1..231: note = variant of adenylate kinase from Thermotoga neapolitana
MHHHHHHGGSGMGAYLVLLGPPGAGKGTQGRIISAKTGIPHISTGDILRQIVAKQNDEVASSIKEWMLKGELVPDEIGNAVVKRRLKEKDCEKGFILDGFPRTVRQAEYLDSFLESQGRQLTAAVLIEVPEDEVVARLLSRRVCPKCGRSYNMIFLPPKEDELCDDCGVSLVQRLDDKEETVRHRLKVYREKTQPVIDYYSKKGILARVDGSQEIRPIVAEVLGILGWSDK

SEQ ID NO: 2375 - DNA, 693 bp, synthetic construct
  misc_feature 1..693: note = variant of adenylate kinase from Thermotoga neapolitana
  source 1..693: mol_type = other DNA
atgcaccatcatcaccatcacgggggctccggcatgggggcatatctggtgttattaggtccgccgggcgcgggaaaaggtacccaaggccgtattatttcggcaaagactggcatcccgcatattagcacgggcgatatcctgcgtgacatcgtcgctaagcaaaacgatgaagttgcctcgagcattaaagagtggatgctgaaaggtgaactcgttccagatgaaattggtaatgcggtagtaaaacgccgcctgaaggagaaagactgcgaaaaaggctttattttggatggtttcccgcgtaccgtgcgccaagcggaatatctggatagttttcttgaaagccagggccgccagttgacagccgccgtgctgattgaggtccccgaagatgaagttgttgcacgtctgctgtctcgccgtgtttgtccgaaatgcgggcgtagttacaacatgatttttctgccaccaaaagaagacgagctgtgtgacgattgcggtgtcagcttagtacagcgttttgatgataaggaagaaacggtccgtcaccgcctgaaagtctaccgtgagaagacccagccggtcattgactattatagtaagaaaggtattctcgcacgcgtagatgggagccaagaaatccggcctatcgtggcagaagtcctggggattctgggttggagcgataag

SEQ ID NO: 2376 - protein, 231 aa, synthetic construct
  REGION 1..231: note = variant of adenylate kinase from Thermotoga neapolitana
MHHHHHHGGSGMGAYLVLLGPPGAGKGTQGRIISAKTGIPHISTGDILRDIVAKQNDEVASSIKEWMLKGELVPDEIGNAVVKRRLKEKDCEKGFILDGFPRTVRQAEYLDSFLESQGRQLTAAVLIEVPEDEVVARLLSRRVCPKCGRSYNMIFLPPKEDELCDDCGVSLVQRFDDKEETVRHRLKVYREKTQPVIDYYSKKGILARVDGSQEIRPIVAEVLGILGWSDK

SEQ ID NO: 2377 - DNA, 693 bp, synthetic construct
  misc_feature 1..693: note = variant of adenylate kinase from Thermotoga neapolitana
  source 1..693: mol_type = other DNA
atgcaccatcatcaccatcacgggggctccggcatgggggcatatctggtgttattaggtccgccgggcgcgggaaaaggtacccaaggccgtattatttcggcaaagactggcatcccgcatattagcacgggcgatatcctgcgtgacatcgtcgctaagcaaaacgatgaagttgcctcgagcattaaagagtggatgctgaaaggtgaactcgttccagatgaaattggtaatgcggtagtaaaacgccgcctgaaggagaaagactgcgaaaaaggctttattttggatggtttcccgcgtaccgtgcgccaagcggaatatctggatagttttcttgaaagccagggccgccagttgacagccgccgtgctgattgaggtccccgaagatgaagttgttgcacgtctgctgtctcgccgtgtttgtccgaaatgcgggcgtagttacaacatgatttttctgccaccaaaagaagacgagctgtgtgacgattgcggtgtccgtttagtacagcgtttagatgataaggaagaaacggtccgtcaccgcctgaaagtctaccgtgagaagacccagccggtcattgactattatagtaagaaaggtattctcgcacgcgtagatgggagccaagaaatccggcctatcgtggcagaagtcctggggattctgggttggagcgataag

SEQ ID NO: 2378 - protein, 231 aa, synthetic construct
  REGION 1..231: note = variant of adenylate kinase from Thermotoga neapolitana
MHHHHHHGGSGMGAYLVLLGPPGAGKGTQGRIISAKTGIPHISTGDILRDIVAKQNDEVASSIKEWMLKGELVPDEIGNAVVKRRLKEKDCEKGFILDGFPRTVRQAEYLDSFLESQGRQLTAAVLIEVPEDEVVARLLSRRVCPKCGRSYNMIFLPPKEDELCDDCGVRLVQRLDDKEETVRHRLKVYREKTQPVIDYYSKKGILARVDGSQEIRPIVAEVLGILGWSDK

SEQ ID NO: 2379 - DNA, 693 bp, synthetic construct
  misc_feature 1..693: note = variant of adenylate kinase from Thermotoga neapolitana
  source 1..693: mol_type = other DNA
atgcaccatcatcaccatcacgggggctccggcatgggggcatatctggtgttattaggtccgccgggcgcgggaaaaggtacccaaggccgtattatttcggcaaagactggcatcccgcatattagcacgggcgatatcctgcgtgacatcgtcgctaagcaaaacgatgaagttgcctcgagcattaaagagtggatgctgaaaggtgaactcgttccagatgaaattggtaatgcggtacttaaacgccgcctgaaggagaaagactgcgaaaaaggctttattttggatggtttcccgcgtaccgtgcgccaagcggaatatctggatagttttcttgaaagccagggccgccagttgacagccgccgtgctgattgaggtccccgaagatgaagttgttgcacgtctgctgtctcgccgtgtttgtccgaaatgcgggcgtagttacaacatgatttttctgccaccaaaagaagacgagctgtgtgacgattgcggtgtcagcttagtacagcgtttagatgataaggaagaaacggtccgtcaccgcctgaaagtctaccgtgagaagacccagccggtcattgactattatagtaagaaaggtattctcgcacgcgtagatgggagccaagaaatccggcctatcgtggcagaagtcctggggattctgggttggagcgataag

SEQ ID NO: 2380 - protein, 231 aa, synthetic construct
  REGION 1..231: note = variant of adenylate kinase from Thermotoga neapolitana
MHHHHHHGGSGMGAYLVLLGPPGAGKGTQGRIISAKTGIPHISTGDILRDIVAKQNDEVASSIKEWMLKGELVPDEIGNAVLKRRLKEKDCEKGFILDGFPRTVRQAEYLDSFLESQGRQLTAAVLIEVPEDEVVARLLSRRVCPKCGRSYNMIFLPPKEDELCDDCGVSLVQRLDDKEETVRHRLKVYREKTQPVIDYYSKKGILARVDGSQEIRPIVAEVLGILGWSDK

SEQ ID NO: 2381 - DNA, 693 bp, synthetic construct
  misc_feature 1..693: note = variant of adenylate kinase from Thermotoga neapolitana
  source 1..693: mol_type = other DNA
atgcaccatcatcaccatcacgggggctccggcatgggggcatatctggtgttattaggtccgccgggcgcgggaaaaggtacccaaggccgtattatttcggcaaagactggcatcccgcatattagcacgggcgatatcctgcgtgacatcgtcgctaagcaaaacgatgaagttgcctcgagcattaaagagtggatgctgaaaggtgaactcgttccagatgaaattggtaatgcggtagtaaaacgccgcctgaaggagaaagactgcgaaaaaggctttattttggatggtttcccgcgtaccgtgcgccaagcggaatatctggatagttttcttgaaagccagggccgccagttgacagccgccgtgctgattgaggtccccgaagatgaagttgttgcacgtctgctgtctcgccgtgtttgtccgaaatgcgggcgtagttacaacatgatttttctgccaccaaaagaagacgagctgtgtgacgattgcggtgtcagcttagtaagtcgtttagatgataaggaagaaacggtccgtcaccgcctgaaagtctaccgtgagaagacccagccggtcattgactattatagtaagaaaggtattctcgcacgcgtagatgggagccaagaaatccggcctatcgtggcagaagtcctggggattctgggttggagcgataag

SEQ ID NO: 2382 - protein, 231 aa, synthetic construct
  REGION 1..231: note = variant of adenylate kinase from Thermotoga neapolitana
MHHHHHHGGSGMGAYLVLLGPPGAGKGTQGRIISAKTGIPHISTGDILRDIVAKQNDEVASSIKEWMLKGELVPDEIGNAVVKRRLKEKDCEKGFILDGFPRTVRQAEYLDSFLESQGRQLTAAVLIEVPEDEVVARLLSRRVCPKCGRSYNMIFLPPKEDELCDDCGVSLVSRLDDKEETVRHRLKVYREKTQPVIDYYSKKGILARVDGSQEIRPIVAEVLGILGWSDK

SEQ ID NO: 2383 - DNA, 693 bp, synthetic construct
  misc_feature 1..693: note = variant of adenylate kinase from Thermotoga neapolitana
  source 1..693: mol_type = other DNA
atgcaccatcatcaccatcacgggggctccggcatgggggcatatctggtgttattaggtccgccgggcgcgggaaaaggtacccaaggccgtattatttcggcaaagactggcatcccgcatattagcacgggcgatatcctgcgtgacatcgtcgctaagcaaaacgatgaagttgcctcgagcattaaaacttggatgctgaaaggtgaactcgttccagatgaaattggtaatgcggtagtaaaacgccgcctgaaggagaaagactgcgaaaaaggctttattttggatggtttcccgcgtaccgtgcgccaagcggaatatctggatagttttcttgaaagccagggccgccagttgacagccgccgtgctgattgaggtccccgaagatgaagttgttgcacgtctgctgtctcgccgtgtttgtccgaaatgcgggcgtagttacaacatgatttttctgccaccaaaagaagacgagctgtgtgacgattgcggtgtcagcttagtacagcgtttagatgataaggaagaaacggtccgtcaccgcctgaaagtctaccgtgagaagacccagccggtcattgactattatagtaagaaaggtattctcgcacgcgtagatgggagccaagaaatccggcctatcgtggcagaagtcctggggattctgggttggagcgataag

SEQ ID NO: 2384 - protein, 231 aa, synthetic construct
  REGION 1..231: note = variant of adenylate kinase from Thermotoga neapolitana
MHHHHHHGGSGMGAYLVLLGPPGAGKGTQGRIISAKTGIPHISTGDILRDIVAKQNDEVASSIKTWMLKGELVPDEIGNAVVKRRLKEKDCEKGFILDGFPRTVRQAEYLDSFLESQGRQLTAAVLIEVPEDEVVARLLSRRVCPKCGRSYNMIFLPPKEDELCDDCGVSLVQRLDDKEETVRHRLKVYREKTQPVIDYYSKKGILARVDGSQEIRPIVAEVLGILGWSDK

SEQ ID NO: 2385 - DNA, 693 bp, synthetic construct
  misc_feature 1..693: note = variant of adenylate kinase from Thermotoga neapolitana
  source 1..693: mol_type = other DNA
atgcaccatcatcaccatcacgggggctccggcatgggggcatatctggtgttattaggtccgccgggcgcgggaaaaggtacccaaggccgtattatttcggcaaagactggcatcccgcatattagcacgggcgatatcctgcgtgacatcgtcatgaagcaaaacgatgaagttgcctcgagcattaaagagtggatgctgaaaggtgaactcgttccagatgaaattggtaatgcggtagtaaaacgccgcctgaaggagaaagactgcgaaaaaggctttattttggatggtttcccgcgtaccgtgcgccaagcggaatatctggatagttttcttgaaagccagggccgccagttgacagccgccgtgctgattgaggtccccgaagatgaagttgttgcacgtctgctgtctcgccgtgtttgtccgaaatgcgggcgtagttacaacatgatttttctgccaccaaaagaagacgagctgtgtgacgattgcggtgtcagcttagtacagcgtttagatgataaggaagaaacggtccgtcaccgcctgaaagtctaccgtgagaagacccagccggtcattgactattatagtaagaaaggtattctcgcacgcgtagatgggagccaagaaatccggcctatcgtggcagaagtcctggggattctgggttggagcgataag

SEQ ID NO: 2386 - protein, 231 aa, synthetic construct
  REGION 1..231: note = variant of adenylate kinase from Thermotoga neapolitana
MHHHHHHGGSGMGAYLVLLGPPGAGKGTQGRIISAKTGIPHISTGDILRDIVMKQNDEVASSIKEWMLKGELVPDEIGNAVVKRRLKEKDCEKGFILDGFPRTVRQAEYLDSFLESQGRQLTAAVLIEVPEDEVVARLLSRRVCPKCGRSYNMIFLPPKEDELCDDCGVSLVQRLDDKEETVRHRLKVYREKTQPVIDYYSKKGILARVDGSQEIRPIVAEVLGILGWSDK

SEQ ID NO: 2387 - DNA, 693 bp, synthetic construct
  misc_feature 1..693: note = variant of adenylate kinase from Thermotoga neapolitana
  source 1..693: mol_type = other DNA
atgcaccatcatcaccatcacgggggctccggcatgggggcatatctggtgttattaggtccgccgggcgcgggaaaaggtacccaaggccgtattatttcggcaaagactggcatcccgcatattagcacgggcgatatcctgcgtgacatcgtcgctaagcaaaacgatgaagttgcctcgagcattaaagagtggatgctgaaaggtgaactcgttccagatgaaattggtaatgcggtagtaaaacgccgcctgaaggagaaagactgcgaaaaaggctttattttggatggtttcccgcgtaccgtgcgccaagcggaatatctggatagttttcttgaaagccagggccgccagttgacagccgccgtgctgattgaggtccccgaagatgaagttgttgcacgtctgctgtctcgccgtgtttgtccgaaatgcgggcgtagttacaacatgatttttctgccaccaaaagaagacgagctgtgtgacgattgcggtgtcagcttagtacagcgtttagatgataaggaagaaacggtccgtgtgcgcctgaaagtctaccgtgagaagacccagccggtcattgactattatagtaagaaaggtattctcgcacgcgtagatgggagccaagaaatccggcctatcgtggcagaagtcctggggattctgggttggagcgataag

SEQ ID NO: 2388 - protein, 231 aa, synthetic construct
  REGION 1..231: note = variant of adenylate kinase from Thermotoga neapolitana
MHHHHHHGGSGMGAYLVLLGPPGAGKGTQGRIISAKTGIPHISTGDILRDIVAKQNDEVASSIKEWMLKGELVPDEIGNAVVKRRLKEKDCEKGFILDGFPRTVRQAEYLDSFLESQGRQLTAAVLIEVPEDEVVARLLSRRVCPKCGRSYNMIFLPPKEDELCDDCGVSLVQRLDDKEETVRVRLKVYREKTQPVIDYYSKKGILARVDGSQEIRPIVAEVLGILGWSDK

SEQ ID NO: 2389 - DNA, 693 bp, synthetic construct
  misc_feature 1..693: note = variant of adenylate kinase from Thermotoga neapolitana
  source 1..693: mol_type = other DNA
atgcaccatcatcaccatcacgggggctccggcatgggggcatatctggtgttattaggtccgccgggcgcgggaaaaggtacccaaggccgtattatttcggcaaagactggcatcccgcatattagcacgggcgatatcctgcgtgacatcgtcgctaagcaaaacgatgaagttgcctcgagcattaaagagtggatgctgaaaggtgaactcgttccagatgaaattggtaatgcggtagtaaaacgccgcctgaaggagaaagactgcgaaaaaggctttattttggatggtttcccgcgtaccgtgcgccaagcggaatatctggatagttttcttgaaagccagggccgccagttgtcggccgccgtgctgattgaggtccccgaagatgaagttgttgcacgtctgctgtctcgccgtgtttgtccgaaatgcgggcgtagttacaacatgatttttctgccaccaaaagaagacgagctgtgtgacgattgcggtgtcagcttagtacagcgtttagatgataaggaagaaacggtccgtcaccgcctgaaagtctaccgtgagaagacccagccggtcattgactattatagtaagaaaggtattctcgcacgcgtagatgggagccaagaaatccggcctatcgtggcagaagtcctggggattctgggttggagcgataag

SEQ ID NO: 2390 - protein, 231 aa, synthetic construct
  REGION 1..231: note = variant of adenylate kinase from Thermotoga neapolitana
MHHHHHHGGSGMGAYLVLLGPPGAGKGTQGRIISAKTGIPHISTGDILRDIVAKQNDEVASSIKEWMLKGELVPDEIGNAVVKRRLKEKDCEKGFILDGFPRTVRQAEYLDSFLESQGRQLSAAVLIEVPEDEVVARLLSRRVCPKCGRSYNMIFLPPKEDELCDDCGVSLVQRLDDKEETVRHRLKVYREKTQPVIDYYSKKGILARVDGSQEIRPIVAEVLGILGWSDK

SEQ ID NO: 2391 - DNA, 693 bp, synthetic construct
  misc_feature 1..693: note = variant of adenylate kinase from Thermotoga neapolitana
  source 1..693: mol_type = other DNA
atgcaccatcatcaccatcacgggggctccggcatgggggcatatctggtgttattaggtccgccgggcgcgggaaaaggtacccaaggccgtattatttcggcaaagactggcatcccgcatattagcacgggcgatatcctgcgtgacatcgtcgctaagcaaaacgatgaagttgcctcgagcattaaagagtggatgctgaaaggtgaactcgttccagatgaaattggtaatgcggtagtaaaacgccgcctgaaggagaaagactgcgaaaaaggctttattttggatggtttcccgcgtaccgtgcgccaagcggaatatctggatagttttcttgaaagccagggccgccagttgacagccgccgtgctgattgaggtccccgaagatgaagttgttgcacgtctgctgtctcgccgtgtttgtccgaaatgcgggcgtagttacaacatgatttttctgccaccaaaagaagacgagctgtgtgacgattgcggtgtcagcttagtacagcgtttagatgataaggaagaaacggtccgtcaccgcctgaaagtctaccgtgagaagacccagatggtcattgactattatagtaagaaaggtattctcgcacgcgtagatgggagccaagaaatccggcctatcgtggcagaagtcctggggattctgggttggagcgataag

SEQ ID NO: 2392 - protein, 231 aa, synthetic construct
  REGION 1..231: note = variant of adenylate kinase from Thermotoga neapolitana
MHHHHHHGGSGMGAYLVLLGPPGAGKGTQGRIISAKTGIPHISTGDILRDIVAKQNDEVASSIKEWMLKGELVPDEIGNAVVKRRLKEKDCEKGFILDGFPRTVRQAEYLDSFLESQGRQLTAAVLIEVPEDEVVARLLSRRVCPKCGRSYNMIFLPPKEDELCDDCGVSLVQRLDDKEETVRHRLKVYREKTQMVIDYYSKKGILARVDGSQEIRPIVAEVLGILGWSDK

SEQ ID NO: 2393 - DNA, 693 bp, synthetic construct
  misc_feature 1..693: note = variant of adenylate kinase from Thermotoga neapolitana
  source 1..693: mol_type = other DNA
atgcaccatcatcaccatcacgggggctccggcatgggggcatatctggtgttattaggtccgccgggcgcgggaaaaggtacccaaggccgtattatttcggcaaagactggcatcccgcatattagcacgggcgatatcctgcgtgacatcgtcgctaagcaaaacgatgaagttgcctcgagcattaaagagtggatgctgaaaggtgaactcgttccagatgaaattggtaatgcggtagtaaaacgccgcctgaaggagaaagactgcgaaaaaggctttattttggatggtttcccgcgtaccgtgcgccaagcggaatatctggatagttttcttgaaagccagggccgccagttgacagccgccgtgctgattgaggtccccgaagatgaagttgttgcacgtctgctgtctcgccgtgtttgtccgaaatgcgggcgtagttacaacatgatttttctgccaccaaaagaagacgagctgtgtgacgattgcggtgtcagcttagtacagcgtttagatgataaggaagaaacggtccgtcaccgcctgaaagtctaccgtgagaagacccagccggtcattgactattatagtaagaaaggtattctcgcacgcgtagatgggagccaagaaatccggcctatcgtggcagaagtcctggggattctgggtctgagcgataag

SEQ ID NO: 2394 - protein, 231 aa, synthetic construct
  REGION 1..231: note = variant of adenylate kinase from Thermotoga neapolitana
MHHHHHHGGSGMGAYLVLLGPPGAGKGTQGRIISAKTGIPHISTGDILRDIVAKQNDEVASSIKEWMLKGELVPDEIGNAVVKRRLKEKDCEKGFILDGFPRTVRQAEYLDSFLESQGRQLTAAVLIEVPEDEVVARLLSRRVCPKCGRSYNMIFLPPKEDELCDDCGVSLVQRLDDKEETVRHRLKVYREKTQPVIDYYSKKGILARVDGSQEIRPIVAEVLGILGLSDK

SEQ ID NO: 2395 - DNA, 693 bp, synthetic construct
  misc_feature 1..693: note = variant of adenylate kinase from Thermotoga neapolitana
  source 1..693: mol_type = other DNA
atgcaccatcatcaccatcacgggggctccggcatgggggcatatctggtgttattaggtccgccgggcgcgggaaaaggtacccaaggccgtattatttcggcaaagactggcatcccgcatattagcacgggcgatatcctgcgtgacatcgtcgctaagcaaaacgatgaagttgcctcgagcattaaagagtggatgtcgaaaggtgaactcgttccagatgaaattggtaatgcggtagtaaaacgccgcctgaaggagaaagactgcgaaaaaggctttattttggatggtttcccgcgtaccgtgcgccaagcggaatatctggatagttttcttgaaagccagggccgccagttgacagccgccgtgctgattgaggtccccgaagatgaagttgttgcacgtctgctgtctcgccgtgtttgtccgaaatgcgggcgtagttacaacatgatttttctgccaccaaaagaagacgagctgtgtgacgattgcggtgtcagcttagtacagcgtttagatgataaggaagaaacggtccgtcaccgcctgaaagtctaccgtgagaagacccagccggtcattgactattatagtaagaaaggtattctcgcacgcgtagatgggagccaagaaatccggcctatcgtggcagaagtcctggggattctgggttggagcgataag

SEQ ID NO: 2396 - protein, 231 aa, synthetic construct
  REGION 1..231: note = variant of adenylate kinase from Thermotoga neapolitana
MHHHHHHGGSGMGAYLVLLGPPGAGKGTQGRIISAKTGIPHISTGDILRDIVAKQNDEVASSIKEWMSKGELVPDEIGNAVVKRRLKEKDCEKGFILDGFPRTVRQAEYLDSFLESQGRQLTAAVLIEVPEDEVVARLLSRRVCPKCGRSYNMIFLPPKEDELCDDCGVSLVQRLDDKEETVRHRLKVYREKTQPVIDYYSKKGILARVDGSQEIRPIVAEVLGILGWSDK

SEQ ID NO: 2397 - DNA, 693 bp, synthetic construct
  misc_feature 1..693: note = variant of adenylate kinase from Thermotoga neapolitana
  source 1..693: mol_type = other DNA
atgcaccatcatcaccatcacgggggctccggcatgggggcatatctggtgttattaggtccgccgggcgcgggaaaaggtacccaaggccgtattatttcggcaaagactggcatcccgcatattagcacgggcgatatcctgcgtgacatcgtcgctaagcaaaacgatgaagttgcctcgagcattaaagagtggatgctgaaaggtgaactcgttccagatgaaattggtaatgcggtagtaaaacgccgcctgaaggaggcggactgcgaaaaaggctttattttggatggtttcccgcgtaccgtgcgccaagcggaatatctggatagttttcttgaaagccagggccgccagttgacagccgccgtgctgattgaggtccccgaagatgaagttgttgcacgtctgctgtctcgccgtgtttgtccgaaatgcgggcgtagttacaacatgatttttctgccaccaaaagaagacgagctgtgtgacgattgcggtgtcagcttagtacagcgtttagatgataaggaagaaacggtccgtcaccgcctgaaagtctaccgtgagaagacccagccggtcattgactattatagtaagaaaggtattctcgcacgcgtagatgggagccaagaaatccggcctatcgtggcagaagtcctggggattctgggttggagcgataag

SEQ ID NO: 2398 - protein, 231 aa, synthetic construct
  REGION 1..231: note = variant of adenylate kinase from Thermotoga neapolitana
MHHHHHHGGSGMGAYLVLLGPPGAGKGTQGRIISAKTGIPHISTGDILRDIVAKQNDEVASSIKEWMLKGELVPDEIGNAVVKRRLKEADCEKGFILDGFPRTVRQAEYLDSFLESQGRQLTAAVLIEVPEDEVVARLLSRRVCPKCGRSYNMIFLPPKEDELCDDCGVSLVQRLDDKEETVRHRLKVYREKTQPVIDYYSKKGILARVDGSQEIRPIVAEVLGILGWSDK

SEQ ID NO: 2399 - DNA, 693 bp, synthetic construct
  misc_feature 1..693: note = variant of adenylate kinase from Thermotoga neapolitana
  source 1..693: mol_type = other DNA
atgcaccatcatcaccatcacgggggctccggcatgggggcatatctggtgttattaggtccgccgggcgcgggaaaaggtacccaaggccgtattattgaggcaaagactggcatcccgcatattagcacgggcgatatcctgcgtgacatcgtcgctaagcaaaacgatgaagttgcctcgagcattaaagagtggatgctgaaaggtgaactcgttccagatgaaattggtaatgcggtagtaaaacgccgcctgaaggagaaagactgcgaaaaaggctttattttggatggtttcccgcgtaccgtgcgccaagcggaatatctggatagttttcttgaaagccagggccgccagttgacagccgccgtgctgattgaggtccccgaagatgaagttgttgcacgtctgctgtctcgccgtgtttgtccgaaatgcgggcgtagttacaacatgatttttctgccaccaaaagaagacgagctgtgtgacgattgcggtgtcagcttagtacagcgtttagatgataaggaagaaacggtccgtcaccgcctgaaagtctaccgtgagaagacccagccggtcattgactattatagtaagaaaggtattctcgcacgcgtagatgggagccaagaaatccggcctatcgtggcagaagtcctggggattctgggttggagcgataag

SEQ ID NO: 2400 - protein, 231 aa, synthetic construct
  REGION 1..231: note = variant of adenylate kinase from Thermotoga neapolitana
MHHHHHHGGSGMGAYLVLLGPPGAGKGTQGRIIEAKTGIPHISTGDILRDIVAKQNDEVASSIKEWMLKGELVPDEIGNAVVKRRLKEKDCEKGFILDGFPRTVRQAEYLDSFLESQGRQLTAAVLIEVPEDEVVARLLSRRVCPKCGRSYNMIFLPPKEDELCDDCGVSLVQRLDDKEETVRHRLKVYREKTQPVIDYYSKKGILARVDGSQEIRPIVAEVLGILGWSDK

SEQ ID NO: 2401 - DNA, 693 bp, synthetic construct
  misc_feature 1..693: note = variant of adenylate kinase from Thermotoga neapolitana
  source 1..693: mol_type = other DNA
atgcaccatcatcaccatcacgggggctccggcatgggggcatatctggtgttattaggtccgccgggcgcgggaaaaggtacccaaggccgtattatttcggcaaagactggcatcccgcatattagcacgggcgatatcctgcgtgacatcgtcgctaagcaaaacgatgaagttgcctcgagcattaaagagtggatgctgaaaggtgaactcgttccagatgaaattggtaatgcggtagtaaaacgccgcctgaaggagaaagactgcgaaaaaggctttattttggatggtttcccgcgtaccgtgcgccaagcggaatatctggatagttttcttgaaagccagagtcgccagttgacagccgccgtgctgattgaggtccccgaagatgaagttgttgcacgtctgctgtctcgccgtgtttgtccgaaatgcgggcgtagttacaacatgatttttctgccaccaaaagaagacgagctgtgtgacgattgcggtgtcagcttagtacagcgtttagatgataaggaagaaacggtccgtcaccgcctgaaagtctaccgtgagaagacccagccggtcattgactattatagtaagaaaggtattctcgcacgcgtagatgggagccaagaaatccggcctatcgtggcagaagtcctggggattctgggttggagcgataag

SEQ ID NO: 2402 - protein, 231 aa, synthetic construct
  REGION 1..231: note = variant of adenylate kinase from Thermotoga neapolitana
MHHHHHHGGSGMGAYLVLLGPPGAGKGTQGRIISAKTGIPHISTGDILRDIVAKQNDEVASSIKEWMLKGELVPDEIGNAVVKRRLKEKDCEKGFILDGFPRTVRQAEYLDSFLESQSRQLTAAVLIEVPEDEVVARLLSRRVCPKCGRSYNMIFLPPKEDELCDDCGVSLVQRLDDKEETVRHRLKVYREKTQPVIDYYSKKGILARVDGSQEIRPIVAEVLGILGWSDK

SEQ ID NO: 2403 - DNA, 693 bp, synthetic construct
  misc_feature 1..693: note = variant of adenylate kinase from Thermotoga neapolitana
  source 1..693: mol_type = other DNA
atgcaccatcatcaccatcacgggggctccggcatgggggcatatctggtgttattaggtccgccgggcgcgggaaaaggtacccaaggccgtattatttcggcaaagactggcatcccgcatattagcacgggcgatatcctgcgtgacatcgtctcgaagcaaaacgatgaagttgcctcgagcattaaagagtggatgctgaaaggtgaactcgttccagatgaaattggtaatgcggtagtaaaacgccgcctgaaggagaaagactgcgaaaaaggctttattttggatggtttcccgcgtaccgtgcgccaagcggaatatctggatagttttcttgaaagccagggccgccagttgacagccgccgtgctgattgaggtccccgaagatgaagttgttgcacgtctgctgtctcgccgtgtttgtccgaaatgcgggcgtagttacaacatgatttttctgccaccaaaagaagacgagctgtgtgacgattgcggtgtcagcttagtacagcgtttagatgataaggaagaaacggtccgtcaccgcctgaaagtctaccgtgagaagacccagccggtcattgactattatagtaagaaaggtattctcgcacgcgtagatgggagccaagaaatccggcctatcgtggcagaagtcctggggattctgggttggagcgataag

SEQ ID NO: 2404 - protein, 231 aa, synthetic construct
  REGION 1..231: note = variant of adenylate kinase from Thermotoga neapolitana
MHHHHHHGGSGMGAYLVLLGPPGAGKGTQGRIISAKTGIPHISTGDILRDIVSKQNDEVASSIKEWMLKGELVPDEIGNAVVKRRLKEKDCEKGFILDGFPRTVRQAEYLDSFLESQGRQLTAAVLIEVPEDEVVARLLSRRVCPKCGRSYNMIFLPPKEDELCDDCGVSLVQRLDDKEETVRHRLKVYREKTQPVIDYYSKKGILARVDGSQEIRPIVAEVLGILGWSDK

SEQ ID NO: 2405 - DNA, 693 bp, synthetic construct
  misc_feature 1..693: note = variant of adenylate kinase from Thermotoga neapolitana
  source 1..693: mol_type = other DNA
atgcaccatcatcaccatcacgggggctccggcatgggggcatatctggtgttattaggtccgccgggcgcgggaaaaggtacccaaggccgtattatttcggcaaagactggcatcccgcatattagcacgggcgatatcctgcgtgacatcgtcgctaagcaaaacgatgaagttgcctcgagcattaaagagtggatgctgaaaggtgaactcgttccagatgaaattggtaatgcggtagtaaaacgccgcctgaaggagaaagactgcgaaaaaggctttattttggatggtttcccgcgtaccgtgcgccaagcggaatatctggatagttttcttgaaagccagggctttcagttgacagccgccgtgctgattgaggtccccgaagatgaagttgttgcacgtctgctgtctcgccgtgtttgtccgaaatgcgggcgtagttacaacatgatttttctgccaccaaaagaagacgagctgtgtgacgattgcggtgtcagcttagtacagcgtttagatgataaggaagaaacggtccgtcaccgcctgaaagtctaccgtgagaagacccagccggtcattgactattatagtaagaaaggtattctcgcacgcgtagatgggagccaagaaatccggcctatcgtggcagaagtcctggggattctgggttggagcgataag

SEQ ID NO: 2406 - protein, 231 aa, synthetic construct
  REGION 1..231: note = variant of adenylate kinase from Thermotoga neapolitana
MHHHHHHGGSGMGAYLVLLGPPGAGKGTQGRIISAKTGIPHISTGDILRDIVAKQNDEVASSIKEWMLKGELVPDEIGNAVVKRRLKEKDCEKGFILDGFPRTVRQAEYLDSFLESQGFQLTAAVLIEVPEDEVVARLLSRRVCPKCGRSYNMIFLPPKEDELCDDCGVSLVQRLDDKEETVRHRLKVYREKTQPVIDYYSKKGILARVDGSQEIRPIVAEVLGILGWSDK

SEQ ID NO: 2407 - DNA, 693 bp, synthetic construct
  misc_feature 1..693: note = variant of adenylate kinase from Thermotoga neapolitana
  source 1..693: mol_type = other DNA
atgcaccatcatcaccatcacgggggctccggcatgggggcatatctggtgttattaggtccgccgggcgcgggaaaaggtacccaaggccgtattatttcggcaaagactggcatcccgcatattagcacgggcgatatcctgcgtgacatcgtcgctaagcaaaacgatgaagttgcctcgagcattaaagagtggatgctgaaaggtgaactcgttccagatgaaattggtaatgcggtagtaaaacgccgcctggcggagaaagactgcgaaaaaggctttattttggatggtttcccgcgtaccgtgcgccaagcggaatatctggatagttttcttgaaagccagggccgccagttgacagccgccgtgctgattgaggtccccgaagatgaagttgttgcacgtctgctgtctcgccgtgtttgtccgaaatgcgggcgtagttacaacatgatttttctgccaccaaaagaagacgagctgtgtgacgattgcggtgtcagcttagtacagcgtttagatgataaggaagaaacggtccgtcaccgcctgaaagtctaccgtgagaagacccagccggtcattgactattatagtaagaaaggtattctcgcacgcgtagatgggagccaagaaatccggcctatcgtggcagaagtcctggggattctgggttggagcgataag

SEQ ID NO: 2408 - protein, 231 aa, synthetic construct
  REGION 1..231: note = variant of adenylate kinase from Thermotoga neapolitana
MHHHHHHGGSGMGAYLVLLGPPGAGKGTQGRIISAKTGIPHISTGDILRDIVAKQNDEVASSIKEWMLKGELVPDEIGNAVVKRRLAEKDCEKGFILDGFPRTVRQAEYLDSFLESQGRQLTAAVLIEVPEDEVVARLLSRRVCPKCGRSYNMIFLPPKEDELCDDCGVSLVQRLDDKEETVRHRLKVYREKTQPVIDYYSKKGILARVDGSQEIRPIVAEVLGILGWSDK

SEQ ID NO: 2409 - DNA, 693 bp, synthetic construct
  misc_feature 1..693: note = variant of adenylate kinase from Thermotoga neapolitana
  source 1..693: mol_type = other DNA
atgcaccatcatcaccatcacgggggctccggcatgggggcatatctggtgttattaggtccgccgggcgcgggaaaaggtacccaaggccgtattatttcggcaaagactggcatcccgcatattagcacgggcgatatcctgcgtgacatcgtcgctaagcaaaacgatgaagttgcctcgagcattaaagagtggatgctgaaaggtgaactcgttccagatgaaattggtaatgcggtagtaaaacgccgcctgaaggagaaagactgcgaaaaaggctttattttggatggtttcccgcgtaccgtgcgccaagcggaatatctggatagttttcttgaaagccagggccgccagttgacagccgccgtgctgattgaggtccccgaagatgaagttgttgcacgtctgctgtctcgccgtgtttgtccgaaatgcgggcgtagttacaacatgatttttctgccaccaaaagaagacgagctgtgtgacgattgcggtgtcagcttagtacagcgtttagatgataagtgtgaaacggtccgtcaccgcctgaaagtctaccgtgagaagacccagccggtcattgactattatagtaagaaaggtattctcgcacgcgtagatgggagccaagaaatccggcctatcgtggcagaagtcctggggattctgggttggagcgataag

SEQ ID NO: 2410 - protein, 231 aa, synthetic construct
  REGION 1..231: note = variant of adenylate kinase from Thermotoga neapolitana
MHHHHHHGGSGMGAYLVLLGPPGAGKGTQGRIISAKTGIPHISTGDILRDIVAKQNDEVASSIKEWMLKGELVPDEIGNAVVKRRLKEKDCEKGFILDGFPRTVRQAEYLDSFLESQGRQLTAAVLIEVPEDEVVARLLSRRVCPKCGRSYNMIFLPPKEDELCDDCGVSLVQRLDDKCETVRHRLKVYREKTQPVIDYYSKKGILARVDGSQEIRPIVAEVLGILGWSDK

SEQ ID NO: 2411 - DNA, 693 bp, synthetic construct
  misc_feature 1..693: note = variant of adenylate kinase from Thermotoga neapolitana
  source 1..693: mol_type = other DNA
atgcaccatcatcaccatcacgggggctccggcatgggggcatatctggtgttattaggtccgccgggcgcgggaaaaggtacccaaggccgtattatttcggcaaagactggcatcccgcatattagcacgggcgatatcctgcgtgacatcgtcgctaagcaaaacgatgaagttgcctcgagcattaaagagtggatgctgaaaggtgaactcgttccagatgaaattggtaatgcggtagtaaaacgccgcctgaaggagaaagactgcgaaaaaggctttattttggatggtttcccgcgtaccgtgcgccaagcggaatatctggatagttttcttgaaagctcgggccgccagttgacagccgccgtgctgattgaggtccccgaagatgaagttgttgcacgtctgctgtctcgccgtgtttgtccgaaatgcgggcgtagttacaacatgatttttctgccaccaaaagaagacgagctgtgtgacgattgcggtgtcagcttagtacagcgtttagatgataaggaagaaacggtccgtcaccgcctgaaagtctaccgtgagaagacccagccggtcattgactattatagtaagaaaggtattctcgcacgcgtagatgggagccaagaaatccggcctatcgtggcagaagtcctggggattctgggttggagcgataag

SEQ ID NO: 2412 - protein, 231 aa, synthetic construct
  REGION 1..231: note = variant of adenylate kinase from Thermotoga neapolitana
MHHHHHHGGSGMGAYLVLLGPPGAGKGTQGRIISAKTGIPHISTGDILRDIVAKQNDEVASSIKEWMLKGELVPDEIGNAVVKRRLKEKDCEKGFILDGFPRTVRQAEYLDSFLESSGRQLTAAVLIEVPEDEVVARLLSRRVCPKCGRSYNMIFLPPKEDELCDDCGVSLVQRLDDKEETVRHRLKVYREKTQPVIDYYSKKGILARVDGSQEIRPIVAEVLGILGWSDK

SEQ ID NO: 2413 - DNA, 693 bp, synthetic construct
  misc_feature 1..693: note = variant of adenylate kinase from Thermotoga neapolitana
  source 1..693: mol_type = other DNA
atgcaccatcatcaccatcacgggggctccggcatgggggcatatctggtgttattaggtccgccgggcgcgggaaaaggtacccaaggccgtattatttcggcaaagactggcatcccgcatattagcacgggcgatatcctgcgtgacatcgtcgctaagcaaaacgatgaagttgcctcgagcattaaagagtggatgctgaaaggtgaactcgttccagatgaaattggtaatgcggtagtaaaacgccgcctgaaggagaaagactgcgaaaaaggctttattttggatggtttcccgcgtaccgtgcgccaagcggaatatctggatagtgagcttgaaagccagggccgccagttgacagccgccgtgctgattgaggtccccgaagatgaagttgttgcacgtctgctgtctcgccgtgtttgtccgaaatgcgggcgtagttacaacatgatttttctgccaccaaaagaagacgagctgtgtgacgattgcggtgtcagcttagtacagcgtttagatgataaggaagaaacggtccgtcaccgcctgaaagtctaccgtgagaagacccagccggtcattgactattatagtaagaaaggtattctcgcacgcgtagatgggagccaagaaatccggcctatcgtggcagaagtcctggggattctgggttggagcgataag

SEQ ID NO: 2414 - protein, 231 aa, synthetic construct
  REGION 1..231: note = variant of adenylate kinase from Thermotoga neapolitana
MHHHHHHGGSGMGAYLVLLGPPGAGKGTQGRIISAKTGIPHISTGDILRDIVAKQNDEVASSIKEWMLKGELVPDEIGNAVVKRRLKEKDCEKGFILDGFPRTVRQAEYLDSELESQGRQLTAAVLIEVPEDEVVARLLSRRVCPKCGRSYNMIFLPPKEDELCDDCGVSLVQRLDDKEETVRHRLKVYREKTQPVIDYYSKKGILARVDGSQEIRPIVAEVLGILGWSDK

SEQ ID NO: 2415 - DNA, 693 bp, synthetic construct
  misc_feature 1..693: note = variant of adenylate kinase from Thermotoga neapolitana
  source 1..693: mol_type = other DNA
atgcaccatcatcaccatcacgggggctccggcatgggggcatatctggtgttattaggtccgccgggcgcgggaaaaggtacccaaggccgtattatttcggcaaagactggcatcccgcatattagcacgggcgatatcctgcgttgtatcgtcgctaagcaaaacgatgaagttgcctcgagcattaaagagtggatgctgaaaggtgaactcgttccagatgaaattggtaatgcggtagtaaaacgccgcctgaaggagaaagactgcgaaaaaggctttattttggatggtttcccgcgtaccgtgcgccaagcggaatatctggatagttttcttgaaagccagggccgccagttgacagccgccgtgctgattgaggtccccgaagatgaagttgttgcacgtctgctgtctcgccgtgtttgtccgaaatgcgggcgtagttacaacatgatttttctgccaccaaaagaagacgagctgtgtgacgattgcggtgtcagcttagtacagcgtttagatgataaggaagaaacggtccgtcaccgcctgaaagtctaccgtgagaagacccagccggtcattgactattatagtaagaaaggtattctcgcacgcgtagatgggagccaagaaatccggcctatcgtggcagaagtcctggggattctgggttggagcgataag

SEQ ID NO: 2416 - protein, 231 aa, synthetic construct
  REGION 1..231: note = variant of adenylate kinase from Thermotoga neapolitana
MHHHHHHGGSGMGAYLVLLGPPGAGKGTQGRIISAKTGIPHISTGDILRCIVAKQNDEVASSIKEWMLKGELVPDEIGNAVVKRRLKEKDCEKGFILDGFPRTVRQAEYLDSFLESQGRQLTAAVLIEVPEDEVVARLLSRRVCPKCGRSYNMIFLPPKEDELCDDCGVSLVQRLDDKEETVRHRLKVYREKTQPVIDYYSKKGILARVDGSQEIRPIVAEVLGILGWSDK

SEQ ID NO: 2417 - DNA, 693 bp, synthetic construct
  misc_feature 1..693: note = variant of adenylate kinase from Thermotoga neapolitana
  source 1..693: mol_type = other DNA
atgcaccatcatcaccatcacgggggctccggcatgggggcatatctggtgttattaggtccgccgggcgcgggaaaaggtacccaaggccgtattatttcggcaaagactggcatcccgcatattagcacgggcgatatcctgcgtgacatcgtcgctaagcaaaacgatgaagttgcctcgagcattaaagagtggatgctgaaaggtgaactcgttccagatgaaattggtaatggggtagtaaaacgccgcctgaaggagaaagactgcgaaaaaggctttattttggatggtttcccgcgtaccgtgcgccaagcggaatatctggatagttttcttgaaagccagggccgccagttgacagccgccgtgctgattgaggtccccgaagatgaagttgttgcacgtctgctgtctcgccgtgtttgtccgaaatgcgggcgtagttacaacatgatttttctgccaccaaaagaagacgagctgtgtgacgattgcggtgtcagcttagtacagcgtttagatgataaggaagaaacggtccgtcaccgcctgaaagtctaccgtgagaagacccagccggtcattgactattatagtaagaaaggtattctcgcacgcgtagatgggagccaagaaatccggcctatcgtggcagaagtcctggggattctgggttggagcgataag

SEQ ID NO: 2418 - protein, 231 aa, synthetic construct
  REGION 1..231: note = variant of adenylate kinase from Thermotoga neapolitana
MHHHHHHGGSGMGAYLVLLGPPGAGKGTQGRIISAKTGIPHISTGDILRDIVAKQNDEVASSIKEWMLKGELVPDEIGNGVVKRRLKEKDCEKGFILDGFPRTVRQAEYLDSFLESQGRQLTAAVLIEVPEDEVVARLLSRRVCPKCGRSYNMIFLPPKEDELCDDCGVSLVQRLDDKEETVRHRLKVYREKTQPVIDYYSKKGILARVDGSQEIRPIVAEVLGILGWSDK

SEQ ID NO: 2419 - DNA, 693 bp, synthetic construct
  misc_feature 1..693: note = variant of adenylate kinase from Thermotoga neapolitana
  source 1..693: mol_type = other DNA
atgcaccatcatcaccatcacgggggctccggcatgggggcatatctggtgttattaggtccgccgggcgcgggaaaaggtacccaaggccgtattatttcggcaaagactggcatcccgcatattagcacgggcgatatcctgcgtgacatcgtcgctaagcaaaacgatgaagttgcctcgagcattaaagagtggatgctgaaaggtgaactcgttccagatgaaattggtaatgcggtagtaaaacgccgcctgaaggagaaagactgcgaaaaaggctttattttggatggtttcccgcgtaccgtgcgccaagcggaatatctggatagttttcttgaaagccagggccgccagttgcatgccgccgtgctgattgaggtccccgaagatgaagttgttgcacgtctgctgtctcgccgtgtttgtccgaaatgcgggcgtagttacaacatgatttttctgccaccaaaagaagacgagctgtgtgacgattgcggtgtcagcttagtacagcgtttagatgataaggaagaaacggtccgtcaccgcctgaaagtctaccgtgagaagacccagccggtcattgactattatagtaagaaaggtattctcgcacgcgtagatgggagccaagaaatccggcctatcgtggcagaagtcctggggattctgggttggagcgataag

SEQ ID NO: 2420 - protein, 231 aa, synthetic construct
  REGION 1..231: note = variant of adenylate kinase from Thermotoga neapolitana
MHHHHHHGGSGMGAYLVLLGPPGAGKGTQGRIISAKTGIPHISTGDILRDIVAKQNDEVASSIKEWMLKGELVPDEIGNAVVKRRLKEKDCEKGFILDGFPRTVRQAEYLDSFLESQGRQLHAAVLIEVPEDEVVARLLSRRVCPKCGRSYNMIFLPPKEDELCDDCGVSLVQRLDDKEETVRHRLKVYREKTQPVIDYYSKKGILARVDGSQEIRPIVAEVLGILGWSDK

SEQ ID NO: 2421 - DNA, 693 bp, synthetic construct
  misc_feature 1..693: note = variant of adenylate kinase from Thermotoga neapolitana
  source 1..693: mol_type = other DNA
atgcaccatcatcaccatcacgggggctccggcatgggggcatatctggtgttattaggtccgccgggcgcgggaaaaggtacccaaggccgtattatttcggcaaagactggcatcccgcatattagcacgggcgatatcctgcgtgacatcgtcgctaagcaaaacgatgaagttgcctcgagcattaaagagtggatgctgaaaggtgaactcgttccagatgaaattggtaatgcggtagtaaaacgccgcctgaaggaggtggactgcgaaaaaggctttattttggatggtttcccgcgtaccgtgcgccaagcggaatatctggatagttttcttgaaagccagggccgccagttgacagccgccgtgctgattgaggtccccgaagatgaagttgttgcacgtctgctgtctcgccgtgtttgtccgaaatgcgggcgtagttacaacatgatttttctgccaccaaaagaagacgagctgtgtgacgattgcggtgtcagcttagtacagcgtttagatgataaggaagaaacggtccgtcaccgcctgaaagtctaccgtgagaagacccagccggtcattgactattatagtaagaaaggtattctcgcacgcgtagatgggagccaagaaatccggcctatcgtggcagaagtcctggggattctgggttggagcgataag

SEQ ID NO: 2422 - protein, 231 aa, synthetic construct
  REGION 1..231: note = variant of adenylate kinase from Thermotoga neapolitana
MHHHHHHGGSGMGAYLVLLGPPGAGKGTQGRIISAKTGIPHISTGDILRDIVAKQNDEVASSIKEWMLKGELVPDEIGNAVVKRRLKEVDCEKGFILDGFPRTVRQAEYLDSFLESQGRQLTAAVLIEVPEDEVVARLLSRRVCPKCGRSYNMIFLPPKEDELCDDCGVSLVQRLDDKEETVRHRLKVYREKTQPVIDYYSKKGILARVDGSQEIRPIVAEVLGILGWSDK

SEQ ID NO: 2423 - DNA, 693 bp, synthetic construct
  misc_feature 1..693: note = variant of adenylate kinase from Thermotoga neapolitana
  source 1..693: mol_type = other DNA
atgcaccatcatcaccatcacgggggctccggcatgggggcatatctggtgttattaggtccgccgggcgcgggaaaaggtacccaaggccgtattatttcggcaaagactggcatcccgcatattagcacgggcgatatcctgcgtgacatcgtcgctaagcaaaacgatgaagttgcctcgagcattaaagagtggatgctgaaaggtgaactcgttccagatgaaattggtaatcgggtagtaaaacgccgcctgaaggagaaagactgcgaaaaaggctttattttggatggtttcccgcgtaccgtgcgccaagcggaatatctggatagttttcttgaaagccagggccgccagttgacagccgccgtgctgattgaggtccccgaagatgaagttgttgcacgtctgctgtctcgccgtgtttgtccgaaatgcgggcgtagttacaacatgatttttctgccaccaaaagaagacgagctgtgtgacgattgcggtgtcagcttagtacagcgtttagatgataaggaagaaacggtccgtcaccgcctgaaagtctaccgtgagaagacccagccggtcattgactattatagtaagaaaggtattctcgcacgcgtagatgggagccaagaaatccggcctatcgtggcagaagtcctggggattctgggttggagcgataag

SEQ ID NO: 2424 - protein, 231 aa, synthetic construct
  REGION 1..231: note = variant of adenylate kinase from Thermotoga neapolitana
MHHHHHHGGSGMGAYLVLLGPPGAGKGTQGRIISAKTGIPHISTGDILRDIVAKQNDEVASSIKEWMLKGELVPDEIGNRVVKRRLKEKDCEKGFILDGFPRTVRQAEYLDSFLESQGRQLTAAVLIEVPEDEVVARLLSRRVCPKCGRSYNMIFLPPKEDELCDDCGVSLVQRLDDKEETVRHRLKVYREKTQPVIDYYSKKGILARVDGSQEIRPIVAEVLGILGWSDK

SEQ ID NO: 2425 - DNA, 693 bp, synthetic construct
  misc_feature 1..693: note = variant of adenylate kinase from Thermotoga neapolitana
  source 1..693: mol_type = other DNA
atgcaccatcatcaccatcacgggggctccggcatgggggcatatctggtgttattaggtccgccgggcgcgggaaaaggtacccaaggccgtattatttcggcaaagactggcatcccgcatattagcacgggcgatatcctgcgtgacatcgtcgctattcaaaacgatgaagttgcctcgagcattaaagagtggatgctgaaaggtgaactcgttccagatgaaattggtaatgcggtagtaaaacgccgcctgaaggagaaagactgcgaaaaaggctttattttggatggtttcccgcgtaccgtgcgccaagcggaatatctggatagttttcttgaaagccagggccgccagttgacagccgccgtgctgattgaggtccccgaagatgaagttgttgcacgtctgctgtctcgccgtgtttgtccgaaatgcgggcgtagttacaacatgatttttctgccaccaaaagaagacgagctgtgtgacgattgcggtgtcagcttagtacagcgtttagatgataaggaagaaacggtccgtcaccgcctgaaagtctaccgtgagaagacccagccggtcattgactattatagtaagaaaggtattctcgcacgcgtagatgggagccaagaaatccggcctatcgtggcagaagtcctggggattctgggttggagcgataag

SEQ ID NO: 2426 - protein, 231 aa, synthetic construct
  REGION 1..231: note = variant of adenylate kinase from Thermotoga neapolitana
MHHHHHHGGSGMGAYLVLLGPPGAGKGTQGRIISAKTGIPHISTGDILRDIVAIQNDEVASSIKEWMLKGELVPDEIGNAVVKRRLKEKDCEKGFILDGFPRTVRQAEYLDSFLESQGRQLTAAVLIEVPEDEVVARLLSRRVCPKCGRSYNMIFLPPKEDELCDDCGVSLVQRLDDKEETVRHRLKVYREKTQPVIDYYSKKGILARVDGSQEIRPIVAEVLGILGWSDK

SEQ ID NO: 2427 - DNA, 693 bp, synthetic construct
  misc_feature 1..693: note = variant of adenylate kinase from Thermotoga neapolitana
  source 1..693: mol_type = other DNA
atgcaccatcatcaccatcacgggggctccggcatgggggcatatctggtgttattaggtccgccgggcgcgggaaaaggtacccaaggccgtattatttcggcaaagactggcatcccgcatattagcacgggcgatatcctgcgtgacatcgtcgctaagcaaaacgatgaagttgcctcgagcattaaagagtggatgctgaaaggtgaactcgttccagatgaaattggtaatgcggtagtaaaacgccgcctgaaggagaaagactgcgaaaaaggctttattttggatggtttcccgcgtaccgtgcgccaagcggaatatctggatagttttcttgaaagccagggccgccagttgacagccgccgtgctgattgaggtccccgaagatgaagttgttgcacgtctgctgtctcgccgtgtttgtccgaaatgcgggcgtagttacaacatgatttttctgccaccaaaagaagacgagctgtgtgacgattgcggtgtcagcttagtacagcgtttagatgataaggaagaaacggtccgtcaccgcctgaaagtctaccaggagaagacccagccggtcattgactattatagtaagaaaggtattctcgcacgcgtagatgggagccaagaaatccggcctatcgtggcagaagtcctggggattctgggttggagcgataag

SEQ ID NO: 2428 - protein, 231 aa, synthetic construct
  REGION 1..231: note = variant of adenylate kinase from Thermotoga neapolitana
MHHHHHHGGSGMGAYLVLLGPPGAGKGTQGRIISAKTGIPHISTGDILRDIVAKQNDEVASSIKEWMLKGELVPDEIGNAVVKRRLKEKDCEKGFILDGFPRTVRQAEYLDSFLESQGRQLTAAVLIEVPEDEVVARLLSRRVCPKCGRSYNMIFLPPKEDELCDDCGVSLVQRLDDKEETVRHRLKVYQEKTQPVIDYYSKKGILARVDGSQEIRPIVAEVLGILGWSDK

SEQ ID NO: 2429 - DNA, 693 bp, synthetic construct
  misc_feature 1..693: note = variant of adenylate kinase from Thermotoga neapolitana
  source 1..693: mol_type = other DNA
atgcaccatcatcaccatcacgggggctccggcatgggggcatatctggtgttattaggtccgccgggcgcgggaaaaggtacccaaggccgtattatttcggcaaagactggcatcccgcatattagcacgggcgatatcctgcgtgacatcgtcgctaagcaaaacgatgaagttgcctcgagcattaaagagtggatgctgaaaggtgaactcgttccagatgaaattggtaatgcggtagtaaaacgccgcctgaaggagaaagactgcgaaaaaggctttattttggatggtttcccgcgtaccgtgcgccaagcggaatatctggatagttttcttgaaagccagggccgccagttgacagccgccgtgctgattgaggtccccgaagatgaagttgttgcacgtctgctgtctcgccgtgtttgtccgaaatgcgggcgtagttacaacatgatttttctgccaccaaaagaagacgagctgtgtgacgattgcggtgtcagcttagtacagcgtttagatgataaggaagaaacggtccgtcaccgcctgaaagtctaccgtgagaagacccagccggtcattgactattatagtaagaaaggtattctcgcacgcgtagatgggagccaagaaatcatgcctatcgtggcagaagtcctggggattctgggttggagcgataag

SEQ ID NO: 2430 - protein, 231 aa, synthetic construct
  REGION 1..231: note = variant of adenylate kinase from Thermotoga neapolitana
MHHHHHHGGSGMGAYLVLLGPPGAGKGTQGRIISAKTGIPHISTGDILRDIVAKQNDEVASSIKEWMLKGELVPDEIGNAVVKRRLKEKDCEKGFILDGFPRTVRQAEYLDSFLESQGRQLTAAVLIEVPEDEVVARLLSRRVCPKCGRSYNMIFLPPKEDELCDDCGVSLVQRLDDKEETVRHRLKVYREKTQPVIDYYSKKGILARVDGSQEIMPIVAEVLGILGWSDK

SEQ ID NO: 2431 - DNA, 693 bp, synthetic construct
  misc_feature 1..693: note = variant of adenylate kinase from Thermotoga neapolitana
  source 1..693: mol_type = other DNA
atgcaccatcatcaccatcacgggggctccggcatgggggcatatctggtgttattaggtccgccgggcgcgggaaaaggtacccaaggccgtattatttcggcaaagactggcatcccgcatattagcacgggcgatatcctacgtgacatcgtcgctaagcaaaacgatgaagttgcctcgagcattaaagagtggatgctgaaaggtgaactcgttccagatgaaattggtaatgcggtagtaaaacgccgcctgaagcggaaagactgcgaaaaaggctttattttggatggtttcccgcgtaccgtgcgccaagcggaatatctggatagttttcttgaaagccagggccgccagttgacagccgccgtgctgattgaggtccccgaagatgaagttgttgcacgtctgctgtctcgccgtgtttgtccgaaatgcgggcgtagttacaacatgatttttctgccaccaaaagaagacgagctgtgtgacgattgcggtgtcagcttagtacagcgtttagatgataaggaagaaacggtccgtcaccgcctgaaagtctaccgtgagaagacccagccggtcattgactattatagtaagaaaggtattctcgcacgcgtagatgggagccaagaaatccggcctatcgtggcagaagtcctggggattctgggttggagcgataag

SEQ ID NO: 2432 - protein, 231 aa, synthetic construct
  REGION 1..231: note = variant of adenylate kinase from Thermotoga neapolitana
MHHHHHHGGSGMGAYLVLLGPPGAGKGTQGRIISAKTGIPHISTGDILRDIVAKQNDEVASSIKEWMLKGELVPDEIGNAVVKRRLKRKDCEKGFILDGFPRTVRQAEYLDSFLESQGRQLTAAVLIEVPEDEVVARLLSRRVCPKCGRSYNMIFLPPKEDELCDDCGVSLVQRLDDKEETVRHRLKVYREKTQPVIDYYSKKGILARVDGSQEIRPIVAEVLGILGWSDK

SEQ ID NO: 2433 - DNA, 693 bp, synthetic construct
  misc_feature 1..693: note = variant of adenylate kinase from Thermotoga neapolitana
  source 1..693: mol_type = other DNA
atgcaccatcatcaccatcacgggggctccggcatgggggcatatctggtgttattaggtccgccgggcgcgggaaaaggtacccaaggccgtattatttcggcaaagactggcatcccgcatattagcacgggcgatatcctgcgtgacatcgtcgctaagcaaaacgatgaagttgcctcgagcattaaagagtggatgctgaaaggtgaactcgttccagatgaaattggtaatgatgtagtaaaacgccgcctgaaggagaaagactgcgaaaaaggctttattttggatggtttcccgcgtaccgtgcgccaagcggaatatctggatagttttcttgaaagccagggccgccagttgacagccgccgtgctgattgaggtccccgaagatgaagttgttgcacgtctgctgtctcgccgtgtttgtccgaaatgcgggcgtagttacaacatgatttttctgccaccaaaagaagacgagctgtgtgacgattgcggtgtcagcttagtacagcgtttagatgataaggaagaaacggtccgtcaccgcctgaaagtctaccgtgagaagacccagccggtcattgactattatagtaagaaaggtattctcgcacgcgtagatgggagccaagaaatccggcctatcgtggcagaagtcctggggattctgggttggagcgataag

SEQ ID NO: 2434 - protein, 231 aa, synthetic construct
  REGION 1..231: note = variant of adenylate kinase from Thermotoga neapolitana
MHHHHHHGGSGMGAYLVLLGPPGAGKGTQGRIISAKTGIPHISTGDILRDIVAKQNDEVASSIKEWMLKGELVPDEIGNDVVKRRLKEKDCEKGFILDGFPRTVRQAEYLDSFLESQGRQLTAAVLIEVPEDEVVARLLSRRVCPKCGRSYNMIFLPPKEDELCDDCGVSLVQRLDDKEETVRHRLKVYREKTQPVIDYYSKKGILARVDGSQEIRPIVAEVLGILGWSDK

SEQ ID NO: 2435 - DNA, 693 bp, synthetic construct
  misc_feature 1..693: note = variant of adenylate kinase from Thermotoga neapolitana
  source 1..693: mol_type = other DNA
atgcaccatcatcaccatcacgggggctccggcatgggggcatatctggtgttattaggtccgccgggcgcgggaaaaggtacccaaggccgtattatttcggcacagactggcatcccgcatattagcacgggcgatatcctgcgtgacatcgtcgctaagcaaaacgatgaagttgcctcgagcattaaagagtggatgctgaaaggtgaactcgttccagatgaaattggtaatgcggtagtaaaacgccgcctgaaggagaaagactgcgaaaaaggctttattttggatggtttcccgcgtaccgtgcgccaagcggaatatctggatagttttcttgaaagccagggccgccagttgacagccgccgtgctgattgaggtccccgaagatgaagttgttgcacgtctgctgtctcgccgtgtttgtccgaaatgcgggcgtagttacaacatgatttttctgccaccaaaagaagacgagctgtgtgacgattgcggtgtcagcttagtacagcgtttagatgataaggaagaaacggtccgtcaccgcctgaaagtctaccgtgagaagacccagccggtcattgactattatagtaagaaaggtattctcgcacgcgtagatgggagccaagaaatccggcctatcgtggcagaagtcctggggattctgggttggagcgataag

SEQ ID NO: 2436 - protein, 231 aa, synthetic construct
  REGION 1..231: note = variant of adenylate kinase from Thermotoga neapolitana
MHHHHHHGGSGMGAYLVLLGPPGAGKGTQGRIISAQTGIPHISTGDILRDIVAKQNDEVASSIKEWMLKGELVPDEIGNAVVKRRLKEKDCEKGFILDGFPRTVRQAEYLDSFLESQGRQLTAAVLIEVPEDEVVARLLSRRVCPKCGRSYNMIFLPPKEDELCDDCGVSLVQRLDDKEETVRHRLKVYREKTQPVIDYYSKKGILARVDGSQEIRPIVAEVLGILGWSDK

SEQ ID NO: 2437 - DNA, 693 bp, synthetic construct
  misc_feature 1..693: note = variant of adenylate kinase from Thermotoga neapolitana
  source 1..693: mol_type = other DNA
atgcaccatcatcaccatcacgggggctccggcatgggggcatatctggtgttattaggtccgccgggcgcgggaaaaggtacccaaggccgtattatttcggcaaagactggcatcccgcatattagcacgggcgatatcctgcgtgacatcgtcgctaagcaaaacgatgaagttgcctcgagcattaaagagtggatgctgaaaggtgaactcgttccagatgaaattggtaatgcggtagtaaaacgccgcctgaaggagaaagactgcgaaaaaggctttattttggatggtttcccgcgtaccgtgtctcaagcggaatatctggatagttttcttgaaagccagggccgccagttgacagccgccgtgctgattgaggtccccgaagatgaagttgttgcacgtctgctgtctcgccgtgtttgtccgaaatgcgggcgtagttacaacatgatttttctgccaccaaaagaagacgagctgtgtgacgattgcggtgtcagcttagtacagcgtttagatgataaggaagaaacggtccgtcaccgcctgaaagtctaccgtgagaagacccagccggtcattgactattatagtaagaaaggtattctcgcacgcgtagatgggagccaagaaatccggcctatcgtggcagaagtcctagggattctgggttggagcgataag

SEQ ID NO: 2438 - protein, 231 aa, synthetic construct
  REGION 1..231: note = variant of adenylate kinase from Thermotoga neapolitana
MHHHHHHGGSGMGAYLVLLGPPGAGKGTQGRIISAKTGIPHISTGDILRDIVAKQNDEVASSIKEWMLKGELVPDEIGNAVVKRRLKEKDCEKGFILDGFPRTVSQAEYLDSFLESQGRQLTAAVLIEVPEDEVVARLLSRRVCPKCGRSYNMIFLPPKEDELCDDCGVSLVQRLDDKEETVRHRLKVYREKTQPVIDYYSKKGILARVDGSQEIRPIVAEVLGILGWSDK

SEQ ID NO: 2439 - DNA, 693 bp, synthetic construct
  misc_feature 1..693: note = variant of adenylate kinase from Thermotoga neapolitana
  source 1..693: mol_type = other DNA
atgcaccatcatcaccatcacgggggctccggcatgggggcatatctggtgttattaggtccgccgggcgcgggaaaaggtacccaaggccgtattatttcggcaaagactggcatcccgcatattagcacgggcgatatcctgcgtgacatcgtcgctaagcaaaacgatgaagttgcctcgagcattaaagagtggatgctgaaaggtgaactcgttccagatgaaattggtaatgcggtagtaaaacgccgcctgaaggagaaagactgcgaaaaaggctttattttggatggtttcccgcgtaccgtgcgccaagcggaatatctggatagttttcttgaaagccagggccgccagttgacagccgccgtgctgattgaggtccccgaagatgaagttgttgcacgtctgctgtctcgccgtgtttgtccgaaatgcgggcgtagttacaacatgatttttctgccaccaaaagaagacgagctgtgtgacgattgcggtgtcagcttagtacagcgtttagatgataaggaagaaacggtccgtcaccgcctgaaagtctaccgtgagaagacccagggggtcattgactattatagtaagaaaggtattctcgcacgcgtagatgggagccaagaaatccggcctatcgtggcagaagtcctggggattctgggttggagcgataag

SEQ ID NO: 2440 - protein, 231 aa, synthetic construct
  REGION 1..231: note = variant of adenylate kinase from Thermotoga neapolitana
MHHHHHHGGSGMGAYLVLLGPPGAGKGTQGRIISAKTGIPHISTGDILRDIVAKQNDEVASSIKEWMLKGELVPDEIGNAVVKRRLKEKDCEKGFILDGFPRTVRQAEYLDSFLESQGRQLTAAVLIEVPEDEVVARLLSRRVCPKCGRSYNMIFLPPKEDELCDDCGVSLVQRLDDKEETVRHRLKVYREKTQGVIDYYSKKGILARVDGSQEIRPIVAEVLGILGWSDK

SEQ ID NO: 2441 - DNA, 693 bp, synthetic construct
  misc_feature 1..693: note = variant of adenylate kinase from Thermotoga neapolitana
  source 1..693: mol_type = other DNA
atgcaccatcatcaccatcacgggggctccggcatgggggcatatctggtgttattaggtccgccgggcgcgggaaaaggtacccaaggccgtattatttcggcaaagactggcatcccgcatattagcacgggcgatatcctgcgtgacatcgtcgctaagcaaaacgatgaagttgcctcgagcattaaagagtggatggtgaaaggtgaactcgttccagatgaaattggtaatgcggtagtaaaacgccgcctgaaggagaaagactgcgaaaaaggctttattttggatggtttcccgcgtaccgtgcgccaagcggaatatctggatagttttcttgaaagccagggccgccagttgacagccgccgtgctgattgaggtccccgaagatgaagttgttgcacgtctgctgtctcgccgtgtttgtccgaaatgcgggcgtagttacaacatgatttttctgccaccaaaagaagacgagctgtgtgacgattgcggtgtcagcttagtacagcgtttagatgataaggaagaaacggtccgtcaccgcctgaaagtctaccgtgagaagacccagccggtcattgactattatagtaagaaaggtattctcgcacgcgtagatgggagccaagaaatccggcctatcgtggcagaagtcctggggattctgggttggagcgataag

SEQ ID NO: 2442 - protein, 231 aa, synthetic construct
  REGION 1..231: note = variant of adenylate kinase from Thermotoga neapolitana
MHHHHHHGGSGMGAYLVLLGPPGAGKGTQGRIISAKTGIPHISTGDILRDIVAKQNDEVASSIKEWMVKGELVPDEIGNAVVKRRLKEKDCEKGFILDGFPRTVRQAEYLDSFLESQGRQLTAAVLIEVPEDEVVARLLSRRVCPKCGRSYNMIFLPPKEDELCDDCGVSLVQRLDDKEETVRHRLKVYREKTQPVIDYYSKKGILARVDGSQEIRPIVAEVLGILGWSDK

SEQ ID NO: 2443 - DNA, 693 bp, synthetic construct
  misc_feature 1..693: note = variant of adenylate kinase from Thermotoga neapolitana
  source 1..693: mol_type = other DNA
atgcaccatcatcaccatcacgggggctccggcatgggggcatatctggtgttattaggtccgccgggcgcgggaaaaggtacccaaggccgtattatttcggcaaagactggcatcccgcatattagcacgggcgatatcctgcgtgacatcgtcgctaagcaaaacgatgaagttgcctcgagcattaaagagtggatgctgaaaggtgaactcgttccagatgaaattggtaatgcggtagtaaaacgccgcctgaaggagaaagactgcgaaaaaggctttattttggatggtttcccgcgtaccgtgttgcaagcggaatatctggatagttttcttgaaagccagggccgccagttgacagccgccgtgctgattgaggtccccgaagatgaagttgttgcacgtctgctgtctcgccgtgtttgtccgaaatgcgggcgtagttacaacatgatttttctgccaccaaaagaagacgagctgtgtgacgattgcggtgtcagcttagtacagcgtttagatgataaggaagaaacggtccgtcaccgcctgaaagtctaccgtgagaagacccagccggtcattgactattatagtaagaaaggtattctcgcacgcgtagatgggagccaagaaatccggcctatcgtggcagaagtcctggggattctgggttggagcgataag

SEQ ID NO: 2444 - protein, 231 aa, synthetic construct
  REGION 1..231: note = variant of adenylate kinase from Thermotoga neapolitana
MHHHHHHGGSGMGAYLVLLGPPGAGKGTQGRIISAKTGIPHISTGDILRDIVAKQNDEVASSIKEWMLKGELVPDEIGNAVVKRRLKEKDCEKGFILDGFPRTVLQAEYLDSFLESQGRQLTAAVLIEVPEDEVVARLLSRRVCPKCGRSYNMIFLPPKEDELCDDCGVSLVQRLDDKEETVRHRLKVYREKTQPVIDYYSKKGILARVDGSQEIRPIVAEVLGILGWSDK

SEQ ID NO: 2445 - DNA, 693 bp, synthetic construct
  misc_feature 1..693: note = variant of adenylate kinase from Thermotoga neapolitana
  source 1..693: mol_type = other DNA
atgcaccatcatcaccatcacgggggctccggcatgggggcatatctggtgttattaggtccgccgggcgcgggaaaaggtacccaaggccgtattatttcggcaaagactggcatcccgcatattagcacgggcgatatcctgcgtgacatcgtcgctaagcaaaacgatgaagttgcctcgagcattaaagagtggatgctgaaaggtgaactcgttccagatgaaattggtaatgcggtagtaaaacgccgcctgaaggagaaagactgcgaaaaaggctttattttggatggtttcccgcgtaccgtgcgccaagcggaatatctggatagttttcttgaaagccagggccgccagttgacagccgccgtgctgattgaggtccccgaagatgaagttgttgcacgtctgctgtctcgccgtgtttgtccgaaatgcgggcgtagttacaacatgatttttctgccaccaaaagaagacgagctgtgtgacgattgcggtgtcagcttagtacagcgtgatgatgataaggaagaaacggtccgtcaccgcctgaaagtctaccgtgagaagacccagccggtcattgactattatagtaagaaaggtattctcgcacgcgtagatgggagccaagaaatccggcctatcgtggcagaagtcctggggattctgggttggagcgataag

SEQ ID NO: 2446 - protein, 231 aa, synthetic construct
  REGION 1..231: note = variant of adenylate kinase from Thermotoga neapolitana
MHHHHHHGGSGMGAYLVLLGPPGAGKGTQGRIISAKTGIPHISTGDILRDIVAKQNDEVASSIKEWMLKGELVPDEIGNAVVKRRLKEKDCEKGFILDGFPRTVRQAEYLDSFLESQGRQLTAAVLIEVPEDEVVARLLSRRVCPKCGRSYNMIFLPPKEDELCDDCGVSLVQRDDDKEETVRHRLKVYREKTQPVIDYYSKKGILARVDGSQEIRPIVAEVLGILGWSDK

SEQ ID NO: 2447 - DNA, 693 bp, synthetic construct
  misc_feature 1..693: note = variant of adenylate kinase from Thermotoga neapolitana
  source 1..693: mol_type = other DNA
atgcaccatcatcaccatcacgggggctccggcatgggggcatatctggtgttattaggtccgccgggcgcgggaaaaggtacccaaggccgtattatttcggcaaagactggcatcccgcatattagcacgggcgatatcctgcgtgacatcgtcgctaagcaaaacgatgaagttgcctcgagcattaaagagtggatgctgaaaggtgaactcgttccagatgaaattggtaatgcggtagtaaaacgccgcctgaaggagaaagactgcgaaaaaggctttattttggatggtttcccgcgtaccgtgcgccaagcggaatatctggatagttttcttgaaagccagggccgccagttgacagccgccgtgctgattgaggtccccgaagatgaagttgttgcacgtctgctgtctcgccgtgtttgtccgaaatgcgggcgtagttacaacatgatttttctgccaccaaaagaagacgagctgtgtgacgattgcggtgtcagcttagtacagcgtttagatgataaggaagaaacggtccgtactcgcctgaaagtctaccgtgagaagacccagccggtcattgactattatagtaagaaaggtattctcgcacgcgtagatgggagccaagaaatccggcctatcgtggcagaagtcctggggattctgggttggagcgataag

SEQ ID NO: 2448 - protein, 231 aa, synthetic construct
  REGION 1..231: note = variant of adenylate kinase from Thermotoga neapolitana
MHHHHHHGGSGMGAYLVLLGPPGAGKGTQGRIISAKTGIPHISTGDILRDIVAKQNDEVASSIKEWMLKGELVPDEIGNAVVKRRLKEKDCEKGFILDGFPRTVRQAEYLDSFLESQGRQLTAAVLIEVPEDEVVARLLSRRVCPKCGRSYNMIFLPPKEDELCDDCGVSLVQRLDDKEETVRTRLKVYREKTQPVIDYYSKKGILARVDGSQEIRPIVAEVLGILGWSDK

SEQ ID NO: 2449 - DNA, 693 bp, synthetic construct
  misc_feature 1..693: note = variant of adenylate kinase from Thermotoga neapolitana
  source 1..693: mol_type = other DNA
atgcaccatcatcaccatcacgggggctccggcatgggggcatatctggtgttattaggtccgccgggcgcgggaaaaggtacccaaggccgtattatttcggcaaagactggcatcccgcatattagcacgggcgatatcctgcgtgacatcgtcgctaagcaaaacgatgaagttgcctcgagcattaaagagtggatgctgaaaggtgaactcgttccagatgaaattggtaatgcggtagtaaaacgccgcctgaaggagaaagactgcgaaaaaggctttattttggatggtttcccgcgtaccgtgcgccaagcggaatatctggatagttttcttgaaagccagggccgccagttgacagccgccgtgctgattgaggtccccgaagatgaagttgttgcacgtctgctgtctcgccgtgtttgtccgaaatgcgggcgtagttacaacatgatttttctgccaccaaaagaagacgagctgtgtgacctgtgcggtgtcagcttagtacagcgtttagatgataaggaagaaacggtccgtcaccgcctgaaagtctaccgtgagaagacccagccggtcattgactattatagtaagaaaggtattctcgcacgcgtagatgggagccaagaaatccggcctatcgtggcagaagtcctggggattctgggttggagcgataag

SEQ ID NO: 2450 - protein, 231 aa, synthetic construct
  REGION 1..231: note = variant of adenylate kinase from Thermotoga neapolitana
MHHHHHHGGSGMGAYLVLLGPPGAGKGTQGRIISAKTGIPHISTGDILRDIVAKQNDEVASSIKEWMLKGELVPDEIGNAVVKRRLKEKDCEKGFILDGFPRTVRQAEYLDSFLESQGRQLTAAVLIEVPEDEVVARLLSRRVCPKCGRSYNMIFLPPKEDELCDLCGVSLVQRLDDKEETVRHRLKVYREKTQPVIDYYSKKGILARVDGSQEIRPIVAEVLGILGWSDK

SEQ ID NO: 2451 - DNA, 693 bp, synthetic construct
  misc_feature 1..693: note = variant of adenylate kinase from Thermotoga neapolitana
  source 1..693: mol_type = other DNA
atgcaccatcatcaccatcacgggggctccggcatgggggcatatctggtgttattaggtccgccgggcgcgggaaaaggtacccaaggccgtattatttcggcaaagactggcatcccgcatattagcacgggcgatatcctgcgtgacatcgtcgctaagcaaaacgatgaagttgcctcgagcattaaagagtggatgctgaaaggtgaactcgttccagatgaaattggtaatgcggtagtaaaacgccgcctgaaggagcatgactgcgaaaaaggctttattttggatggtttcccgcgtaccgtgcgccaagcggaatatctggatagttttcttgaaagccagggccgccagttgacagccgccgtgctgattgaggtccccgaagatgaagttgttgcacgtctgctgtctcgccgtgtttgtccgaaatgcgggcgtagttacaacatgatttttctgccaccaaaagaagacgagctgtgtgacgattgcggtgtcagcttagtacagcgtttagatgataaggaagaaacggtccgtcaccgcctgaaagtctaccgtgagaagacccagccggtcattgactattatagtaagaaaggtattctcgcacgcgtagatgggagccaagaaatccggcctatcgtggcagaagtcctggggattctgggttggagcgataag

SEQ ID NO: 2452 - protein, 231 aa, synthetic construct
  REGION 1..231: note = variant of adenylate kinase from Thermotoga neapolitana
MHHHHHHGGSGMGAYLVLLGPPGAGKGTQGRIISAKTGIPHISTGDILRDIVAKQNDEVASSIKEWMLKGELVPDEIGNAVVKRRLKEHDCEKGFILDGFPRTVRQAEYLDSFLESQGRQLTAAVLIEVPEDEVVARLLSRRVCPKCGRSYNMIFLPPKEDELCDDCGVSLVQRLDDKEETVRHRLKVYREKTQPVIDYYSKKGILARVDGSQEIRPIVAEVLGILGWSDK

SEQ ID NO: 2453 - DNA, 693 bp, synthetic construct
  misc_feature 1..693: note = variant of adenylate kinase from Thermotoga neapolitana
  source 1..693: mol_type = other DNA
atgcaccatcatcaccatcacgggggctccggcatgggggcatatctggtgttattaggtccgccgggcgcgggaaaaggtacccaaggccgtattatttcggcaaagactcgtatcccgcatattagcacgggcgatatcctgcgtgacatcgtcgctaagcaaaacgatgaagttgcctcgagcattaaagagtggatgctgaaaggtgaactcgttccagatgaaattggtaatgcggtagtaaaacgccgcctgaaggagaaagactgcgaaaaaggctttattttggatggtttcccgcgtaccgtgcgccaagcggaatatctggatagttttcttgaaagccagggccgccagttgacagccgccgtgctgattgaggtccccgaagatgaagttgttgcacgtctgctgtctcgccgtgtttgtccgaaatgcgggcgtagttacaacatgatttttctgccaccaaaagaagacgagctgtgtgacgattgcggtgtcagcttagtacagcgtttagatgataaggaagaaacggtccgtcaccgcctgaaagtctaccgtgagaagacccagccggtcattgactattatagtaagaaaggtattctcgcacgcgtagatgggagccaagaaatccggcctatcgtggcagaagtcctggggattctgggttggagcgataag

SEQ ID NO: 2454 - protein, 231 aa, synthetic construct
  REGION 1..231: note = variant of adenylate kinase from Thermotoga neapolitana
MHHHHHHGGSGMGAYLVLLGPPGAGKGTQGRIISAKTRIPHISTGDILRDIVAKQNDEVASSIKEWMLKGELVPDEIGNAVVKRRLKEKDCEKGFILDGFPRTVRQAEYLDSFLESQGRQLTAAVLIEVPEDEVVARLLSRRVCPKCGRSYNMIFLPPKEDELCDDCGVSLVQRLDDKEETVRHRLKVYREKTQPVIDYYSKKGILARVDGSQEIRPIVAEVLGILGWSDK

SEQ ID NO: 2455 - DNA, 693 bp, synthetic construct
  misc_feature 1..693: note = variant of adenylate kinase from Thermotoga neapolitana
  source 1..693: mol_type = other DNA
atgcaccatcatcaccatcacgggggctccggcatgggggcatatctggtgttattaggtccgccgggcgcgggaaaaggtacccaaggccgtattatttcggcaaagactggcatcccgcatattagcacgggcgatatcctgcgtgacatcgtcgctggtcaaaacgatgaagttgcctcgagcattaaagagtggatgctgaaaggtgaactcgttccagatgaaattggtaatgcggtagtaaaacgccgcctgaaggagaaagactgcgaaaaaggctttattttggatggtttcccgcgtaccgtgcgccaagcggaatatctggatagttttcttgaaagccagggccgccagttgacagccgccgtgctgattgaggtccccgaagatgaagttgttgcacgtctgctgtctcgccgtgtttgtccgaaatgcgggcgtagttacaacatgatttttctgccaccaaaagaagacgagctgtgtgacgattgcggtgtcagcttagtacagcgtttagatgataaggaagaaacggtccgtcaccgcctgaaagtctaccgtgagaagacccagccggtcattgactattatagtaagaaaggtattctcgcacgcgtagatgggagccaagaaatccggcctatcgtggcagaagtcctggggattctgggttggagcgataag

SEQ ID NO: 2456 - protein, 231 aa, synthetic construct
  REGION 1..231: note = variant of adenylate kinase from Thermotoga neapolitana
MHHHHHHGGSGMGAYLVLLGPPGAGKGTQGRIISAKTGIPHISTGDILRDIVAGQNDEVASSIKEWMLKGELVPDEIGNAVVKRRLKEKDCEKGFILDGFPRTVRQAEYLDSFLESQGRQLTAAVLIEVPEDEVVARLLSRRVCPKCGRSYNMIFLPPKEDELCDDCGVSLVQRLDDKEETVRHRLKVYREKTQPVIDYYSKKGILARVDGSQEIRPIVAEVLGILGWSDK

SEQ ID NO: 2457 - DNA, 693 bp, synthetic construct
  misc_feature 1..693: note = variant of adenylate kinase from Thermotoga neapolitana
  source 1..693: mol_type = other DNA
atgcaccatcatcaccatcacgggggctccggcatgggggcatatctggtgttattaggtccgccgggcgcgggaaaaggtacccaaggccgtattatttcggcaaagacttttatcccgcatattagcacgggcgatatcctgcgtgacatcgtcgctaagcaaaacgatgaagttgcctcgagcattaaagagtggatgctgaaaggtgaactcgttccagatgaaattggtaatgcggtagtaaaacgccgcctgaaggagaaagactgcgaaaaaggctttattttggatggtttcccgcgtaccgtgcgccaagcggaatatctggatagttttcttgaaagccagggccgccagttgacagccgccgtgctgattgaggtccccgaagatgaagttgttgcacgtctgctgtctcgccgtgtttgtccgaaatgcgggcgtagttacaacatgatttttctgccaccaaaagaagacgagctgtgtgacgattgcggtgtcagcttagtacagcgtttagatgataaggaagaaacggtccgtcaccgcctgaaagtctaccgtgagaagacccagccggtcattgactattatagtaagaaaggtattctcgcacgcgtagatgggagccaagaaatccggcctatcgtggcagaagtcctggggattctgggttggagcgataag

SEQ ID NO: 2458 - protein, 231 aa, synthetic construct
  REGION 1..231: note = variant of adenylate kinase from Thermotoga neapolitana
MHHHHHHGGSGMGAYLVLLGPPGAGKGTQGRIISAKTFIPHISTGDILRDIVAKQNDEVASSIKEWMLKGELVPDEIGNAVVKRRLKEKDCEKGFILDGFPRTVRQAEYLDSFLESQGRQLTAAVLIEVPEDEVVARLLSRRVCPKCGRSYNMIFLPPKEDELCDDCGVSLVQRLDDKEETVRHRLKVYREKTQPVIDYYSKKGILARVDGSQEIRPIVAEVLGILGWSDK

SEQ ID NO: 2459 - DNA, 693 bp, synthetic construct
  misc_feature 1..693: note = variant of adenylate kinase from Thermotoga neapolitana
  source 1..693: mol_type = other DNA
atgcaccatcatcaccatcacgggggctccggcatgggggcatatctggtgttattaggtccgccgggcgcgggaaaaggtacccaaggccgtattatttcggcaaagactggcatcccgcatattagcacgggcgatatcctgcgtgacatcgtcgctaagcaaaacgatgaagttgcctcgagcattaaagagtggatgctgaaaggtgaactcgttccagatgaaattggtaatgcggtagtaaaacgccgcctgaaggagattgactgcgaaaaaggctttattttggatggtttcccgcgtaccgtgcgccaagcggaatatctggatagttttcttgaaagccagggccgccagttgacagccgccgtgctgattgaggtccccgaagatgaagttgttgcacgtctgctgtctcgccgtgtttgtccgaaatgcgggcgtagttacaacatgatttttctgccaccaaaagaagacgagctgtgtgacgattgcggtgtcagcttagtacagcgtttagatgataaggaagaaacggtccgtcaccgcctgaaagtctaccgtgagaagacccagccggtcattgactattatagtaagaaaggtattctcgcacgcgtagatgggagccaagaaatccggcctatcgtggcagaagtcctggggattctgggttggagcgataag

SEQ ID NO: 2460 - protein, 231 aa, synthetic construct
  REGION 1..231: note = variant of adenylate kinase from Thermotoga neapolitana
MHHHHHHGGSGMGAYLVLLGPPGAGKGTQGRIISAKTGIPHISTGDILRDIVAKQNDEVASSIKEWMLKGELVPDEIGNAVVKRRLKEIDCEKGFILDGFPRTVRQAEYLDSFLESQGRQLTAAVLIEVPEDEVVARLLSRRVCPKCGRSYNMIFLPPKEDELCDDCGVSLVQRLDDKEETVRHRLKVYREKTQPVIDYYSKKGILARVDGSQEIRPIVAEVLGILGWSDK

SEQ ID NO: 2461 - DNA, 693 bp, synthetic construct
  misc_feature 1..693: note = variant of adenylate kinase from Thermotoga neapolitana
  source 1..693: mol_type = other DNA
atgcaccatcatcaccatcacgggggctccggcatgggggcatatctggtgttattaggtccgccgggcgcgggaaaaggtacccaaggccgtattatttcggcaaagactggcatcccgcatattagcacgggcgatatcctgcgtgacatcgtcgctaagcaaaacgatgaagttgcctcgagcattaaagagtggatgctgaaaggtgaactcgttccagatgaaattggtaatgcggtagtaaaacgccgcctgaaggagaaagactgcgaaaaaggctttattttggatggtttcccgcgtaccgtgcgccaagcggaatatctggatagttttcttgaaagccagggccgccagttgacagccgccgtgctgattgaggtccccgaagatgaagttgttgcacgtctgctgtctcgccgtgtttgtccgaaatgcgggcgtagttacaacatgatttttctgccaccaaaagaagacgagctgtgtgacgattgcggtattagcttagtacagcgtttagatgataaggaagaaacggtccgtcaccgcctgaaagtctaccgtgagaagacccagccggtcattgactattatagtaagaaaggtattctcgcacgcgtagatgggagccaagaaatccggcctatcgtggcagaagtcctggggattctgggttggagcgataag

SEQ ID NO: 2462 - protein, 231 aa, synthetic construct
  REGION 1..231: note = variant of adenylate kinase from Thermotoga neapolitana
MHHHHHHGGSGMGAYLVLLGPPGAGKGTQGRIISAKTGIPHISTGDILRDIVAKQNDEVASSIKEWMLKGELVPDEIGNAVVKRRLKEKDCEKGFILDGFPRTVRQAEYLDSFLESQGRQLTAAVLIEVPEDEVVARLLSRRVCPKCGRSYNMIFLPPKEDELCDDCGISLVQRLDDKEETVRHRLKVYREKTQPVIDYYSKKGILARVDGSQEIRPIVAEVLGILGWSDK

SEQ ID NO: 2463 - DNA, 693 bp, synthetic construct
  misc_feature 1..693: note = variant of adenylate kinase from Thermotoga neapolitana
  source 1..693: mol_type = other DNA
atgcaccatcatcaccatcacgggggctccggcatgggggcatatctggtgttattaggtccgccgggcgcgggaaaaggtacccaaggccgtattatttcggcaaagactggcatcccgcatattagcacgggcgatatcctgcgtgacatcgtcgctaagcaaaacgatgaagttgcctcgagcattaaagagtgtatgctgaaaggtgaactcgttccagatgaaattggtaatgcggtagtaaaacgccgcctgaaggagaaagactgcgaaaaaggctttattttggatggtttcccgcgtaccgtgcgccaagcggaatatctggatagttttcttgaaagccagggccgccagttgacagccgccgtgctgattgaggtccccgaagatgaagttgttgcacgtctgctgtctcgccgtgtttgtccgaaatgcgggcgtagttacaacatgatttttctgccaccaaaagaagacgagctgtgtgacgattgcggtgtcagcttagtacagcgtttagatgataaggaagaaacggtccgtcaccgcctgaaagtctaccgtgagaagacccagccggtcattgactattatagtaagaaaggtattctcgcacgcgtagatgggagccaagaaatccggcctatcgtggcagaagtcctggggattctgggttggagcgataag

SEQ ID NO: 2464 - protein, 231 aa, synthetic construct
  REGION 1..231: note = variant of adenylate kinase from Thermotoga neapolitana
MHHHHHHGGSGMGAYLVLLGPPGAGKGTQGRIISAKTGIPHISTGDILRDIVAKQNDEVASSIKECMLKGELVPDEIGNAVVKRRLKEKDCEKGFILDGFPRTVRQAEYLDSFLESQGRQLTAAVLIEVPEDEVVARLLSRRVCPKCGRSYNMIFLPPKEDELCDDCGVSLVQRLDDKEETVRHRLKVYREKTQPVIDYYSKKGILARVDGSQEIRPIVAEVLGILGWSDK

SEQ ID NO: 2465 - DNA, 693 bp, synthetic construct
  misc_feature 1..693: note = variant of adenylate kinase from Thermotoga neapolitana
  source 1..693: mol_type = other DNA
atgcaccatcatcaccatcacgggggctccggcatgggggcatatctggtgttattaggtccgccgggcgcgggaaaaggtacccaaggccgtattatttcggcaaagactggcatcccgcatattagcacgggcgatatcctgcgtgacatcgtcgctaagcaaaacgatgaagttgcctcgagcattaaagagtggatgctgaaaggtgaactcgttccagatgaaattggtaatgcggtagtaaaacgccgcctgaaggagaaagactgcgaaaaaggctttattttggatggtttcccgcgtaccgtgcgccaagcggaatatctggatagttttcttgaaagccagggccgccagttgacagccgccgtgctgattgaggtccccgaagatgaagttgttgcacgtctgctgtctcgctgggtttgtccgaaatgcgggcgtagttacaacatgatttttctgccaccaaaagaagacgagctgtgtgacgattgcggtgtcagcttagtacagcgtttagatgataaggaagaaacggtccgtcaccgcctgaaagtctaccgtgagaagacccagccggtcattgactattatagtaagaaaggtattctcgcacgcgtagatgggagccaagaaatccggcctatcgtggcagaagtcctggggattctgggttggagcgataag

SEQ ID NO: 2466 - protein, 231 aa, synthetic construct
  REGION 1..231: note = variant of adenylate kinase from Thermotoga neapolitana
MHHHHHHGGSGMGAYLVLLGPPGAGKGTQGRIISAKTGIPHISTGDILRDIVAKQNDEVASSIKEWMLKGELVPDEIGNAVVKRRLKEKDCEKGFILDGFPRTVRQAEYLDSFLESQGRQLTAAVLIEVPEDEVVARLLSRWVCPKCGRSYNMIFLPPKEDELCDDCGVSLVQRLDDKEETVRHRLKVYREKTQPVIDYYSKKGILARVDGSQEIRPIVAEVLGILGWSDK

SEQ ID NO: 2467 - DNA, 693 bp, synthetic construct
  misc_feature 1..693: note = variant of adenylate kinase from Thermotoga neapolitana
  source 1..693: mol_type = other DNA
atgcaccatcatcaccatcacgggggctccggcatgggggcatatctggtgttattaggtccgccgggcgcgggaaaaggtacccaaggccgtattatttcggcaaagactggcatcccgcatattagcacgggcgatatcctgcgtgacatcgtcgctaagcaaaacgatgaagttgcctcgagcattaaagagtggatgctgaaaggtgaactcgttccagatgaaattggtaatgcggtagtaaaacgccgcctgaaggagaaagactgcgaaaaaggctttattttggatggtttcccgcgtaccgtgcgccaagcggaatatctggatagttttcttgaaagcctgggccgccagttgacagccgccgtgctgattgaggtccccgaagatgaagttgttgcacgtctgctgtctcgccgtgtttgtccgaaatgcgggcgtagttacaacatgatttttctgccaccaaaagaagacgagctgtgtgacgattgcggtgtcagcttagtacagcgtttagatgataaggaagaaacggtccgtcaccgcctgaaagtctaccgtgagaagacccagccggtcattgactattatagtaagaaaggtattctcgcacgcgtagatgggagccaagaaatccggcctatcgtggcagaagtcctggggattctgggttggagcgataag

SEQ ID NO: 2468 - protein, 231 aa, synthetic construct
  REGION 1..231: note = variant of adenylate kinase from Thermotoga neapolitana
MHHHHHHGGSGMGAYLVLLGPPGAGKGTQGRIISAKTGIPHISTGDILRDIVAKQNDEVASSIKEWMLKGELVPDEIGNAVVKRRLKEKDCEKGFILDGFPRTVRQAEYLDSFLESLGRQLTAAVLIEVPEDEVVARLLSRRVCPKCGRSYNMIFLPPKEDELCDDCGVSLVQRLDDKEETVRHRLKVYREKTQPVIDYYSKKGILARVDGSQEIRPIVAEVLGILGWSDK

SEQ ID NO: 2469 - DNA, 693 bp, synthetic construct
  misc_feature 1..693: note = variant of adenylate kinase from Thermotoga neapolitana
  source 1..693: mol_type = other DNA
atgcaccatcatcaccatcacgggggctccggcatgggggcatatctggtgttattaggtccgccgggcgcgggaaaaggtacccaaggccgtattatttcggcaaagactggcatcccgcatattagcacgggcgatatcctgcgtgacatcgtcgctaagcaaaacgatgaagttgcctcgagcattaaagagtggatgctgaaaggtgaactcgttccagatgaaattggtaatgcggtagtaaaacgccgcctgaaggagaaagactgcgaaaaaggctttattttggatggtttcccgcgtaccgtgcgccaagcggaatatctggatagttttcttgaaagccagggccgccagttgacagccgccgtgctgattgaggtccccgaagatgaagttgtttatcgtctgctgtctcgccgtgtttgtccgaaatgcgggcgtagttacaacatgatttttctgccaccaaaagaagacgagctgtgtgacgattgcggtgtcagcttagtacagcgtttagatgataaggaagaaacggtccgtcaccgcctgaaagtctaccgtgagaagacccagccggtcattgactattatagtaagaaaggtattctcgcacgcgtagatgggagccaagaaatccggcctatcgtggcagaagtcctggggattctgggttggagcgataag

SEQ ID NO: 2470 - protein, 231 aa, synthetic construct
  REGION 1..231: note = variant of adenylate kinase from Thermotoga neapolitana
MHHHHHHGGSGMGAYLVLLGPPGAGKGTQGRIISAKTGIPHISTGDILRDIVAKQNDEVASSIKEWMLKGELVPDEIGNAVVKRRLKEKDCEKGFILDGFPRTVRQAEYLDSFLESQGRQLTAAVLIEVPEDEVVYRLLSRRVCPKCGRSYNMIFLPPKEDELCDDCGVSLVQRLDDKEETVRHRLKVYREKTQPVIDYYSKKGILARVDGSQEIRPIVAEVLGILGWSDK

SEQ ID NO: 2471 - DNA, 693 bp, synthetic construct
  misc_feature 1..693: note = variant of adenylate kinase from Thermotoga neapolitana
  source 1..693: mol_type = other DNA
atgcaccatcatcaccatcacgggggctccggcatgggggcatatctggtgttattaggtccgccgggcgcgggaaaaggtacccaaggccgtattatttcggcaaagactggcatcccgcatattagcacgggcgatatcctgcgtgacatcgtcgctaagcaaaacgatgaagttgcctcgagcattaaagagtggatgctgaaaggtgaactcgttccagatgaaattggtaatgcggtagtaaaacgccgcctgaaggagaaagactgcgaaaaaggctttattttggatggtttcccgcgtaccgtgcgccaagcggaatatctggatagttttcttgaaagccagggccgccagttgacagccgccgtgctgattgaggtccccgttgatgaagttgttgcacgtctgctgtctcgccgtgtttgtccgaaatgcgggcgtagttacaacatgatttttctgccaccaaaagaagacgagctgtgtgacgattgcggtgtcagcttagtacagcgtttagatgataaggaagaaacggtccgtcaccgcctgaaagtctaccgtgagaagacccagccggtcattgactattatagtaagaaaggtattctcgcacgcgtagatgggagccaagaaatccggcctatcgtggcagaagtcctggggattctgggttggagcgataag

SEQ ID NO: 2472 - protein, 231 aa, synthetic construct
  REGION 1..231: note = variant of adenylate kinase from Thermotoga neapolitana
MHHHHHHGGSGMGAYLVLLGPPGAGKGTQGRIISAKTGIPHISTGDILRDIVAKQNDEVASSIKEWMLKGELVPDEIGNAVVKRRLKEKDCEKGFILDGFPRTVRQAEYLDSFLESQGRQLTAAVLIEVPVDEVVARLLSRRVCPKCGRSYNMIFLPPKEDELCDDCGVSLVQRLDDKEETVRHRLKVYREKTQPVIDYYSKKGILARVDGSQEIRPIVAEVLGILGWSDK

SEQ ID NO: 2473 - DNA, 693 bp, synthetic construct
  misc_feature 1..693: note = variant of adenylate kinase from Thermotoga neapolitana
  source 1..693: mol_type = other DNA
atgcaccatcatcaccatcacgggggctccggcatgggggcatatctggtgttattaggtccgccgggcgcgggaaaaggtacccaaggccgtattatttcggcaaagactggcatcccgcatattagcacgggcgatatcctgcgtgacatcgtcgctaagcaaaacgatgaagttgcctcgagcattaaagagtggatgctgaaaggtgaactcgttccagatgaaattggtaatgcggtagtaaaacgccgcctgaaggagaaagactgcgaaaaaggctttattttggatggtttcccgcgtaccgtgcgccaagcggaatatctggatagttttcttgaaagccagggccgccagttgacagccgccgtgctgattgaggtccccgaagatgaagttgttgcacgtctgctgtctcgccgtgtttgtccgaaatgcgggcgtagttacaacatgatttttctgccaccaaaagaagacgagctgtgtgacgattgcggtgtcagcttagtacagcgtttagatgataaggaagaaacggtccgtcaccgcctgtatgtctaccgtgagaagacccagccggtcattgactattatagtaagaaaggtattctcgcacgcgtagatgggagccaagaaatccggcctatcgtggcagaagtcctggggattctgggttggagcgataag

SEQ ID NO: 2474 - protein, 231 aa, synthetic construct
  REGION 1..231: note = variant of adenylate kinase from Thermotoga neapolitana
MHHHHHHGGSGMGAYLVLLGPPGAGKGTQGRIISAKTGIPHISTGDILRDIVAKQNDEVASSIKEWMLKGELVPDEIGNAVVKRRLKEKDCEKGFILDGFPRTVRQAEYLDSFLESQGRQLTAAVLIEVPEDEVVARLLSRRVCPKCGRSYNMIFLPPKEDELCDDCGVSLVQRLDDKEETVRHRLYVYREKTQPVIDYYSKKGILARVDGSQEIRPIVAEVLGILGWSDK

SEQ ID NO: 2475 - DNA, 693 bp, synthetic construct
  misc_feature 1..693: note = variant of adenylate kinase from Thermotoga neapolitana
  source 1..693: mol_type = other DNA
atgcaccatcatcaccatcacgggggctccggcatgggggcatatctggtgttattaggtccgccgggcgcgggaaaaggtacccaaggccgtattatttcggcaaagactggcatcttgcatattagcacgggcgatatcctgcgtgacatcgtcgctaagcaaaacgatgaagttgcctcgagcattaaagagtggatgctgaaaggtgaactcgttccagatgaaattggtaatgcggtagtaaaacgccgcctgaaggagaaagactgcgaaaaaggctttattttggatggtttcccgcgtaccgtgcgccaagcggaatatctggatagttttcttgaaagccagggccgccagttgacagccgccgtgctgattgaggtccccgaagatgaagttgttgcacgtctgctgtctcgccgtgtttgtccgaaatgcgggcgtagttacaacatgatttttctgccaccaaaagaagacgagctgtgtgacgattgcggtgtcagcttagtacagcgtttagatgataaggaagaaacggtccgtcaccgcctgaaagtctaccgtgagaagacccagccggtcattgactattatagtaagaaaggtattctcgcacgcgtagatgggagccaagaaatccggcctatcgtggcagaagtcctggggattctgggttggagcgataag

SEQ ID NO: 2476 - protein, 231 aa, synthetic construct
  REGION 1..231: note = variant of adenylate kinase from Thermotoga neapolitana
MHHHHHHGGSGMGAYLVLLGPPGAGKGTQGRIISAKTGILHISTGDILRDIVAKQNDEVASSIKEWMLKGELVPDEIGNAVVKRRLKEKDCEKGFILDGFPRTVRQAEYLDSFLESQGRQLTAAVLIEVPEDEVVARLLSRRVCPKCGRSYNMIFLPPKEDELCDDCGVSLVQRLDDKEETVRHRLKVYREKTQPVIDYYSKKGILARVDGSQEIRPIVAEVLGILGWSDK

SEQ ID NO: 2477 - DNA, 693 bp, synthetic construct
  misc_feature 1..693: note = variant of adenylate kinase from Thermotoga neapolitana
  source 1..693: mol_type = other DNA
atgcaccatcatcaccatcacgggggctccggcatgggggcatatctggtgttattaggtccgccgggcgcgggaaaaggtacccaaggccgtattatttcggcaaagactggcatcccgcatattagcacgggcgatatcctgcgtgacatcgtcgctaagcaaaacgatgaagttgcctcgagcattaaagagtggatgctgaaaggtgaactcgttccagatgaaattggtaatgcggtagtaaaacgccgcctgaaggagaaagactgcgaaaaaggctttattttggatggtttcccgcgtaccgtgcgccaagcggaatatctggatagttttcttgaaagccagggccgccagttgacagccgccgtgctgattgaggtccccgaagatgaagttgttgcacgtctgctgtctcgccgtgtttgtccgaaatgcgggcgtagttacaacatgatttttctgccaccaaaagaagacgagctgtgtgacgattgcggtgtcagcttagtaacgcgtttagatgataaggaagaaacggtccgtcaccgcctgaaagtctaccgtgagaagacccagccggtcattgactattatagtaagaaaggtattctcgcacgcgtagatgggagccaagaaatccggcctatcgtggcagaagtcctggggattctgggttggagcgataag

SEQ ID NO: 2478 - protein, 231 aa, synthetic construct
  REGION 1..231: note = variant of adenylate kinase from Thermotoga neapolitana
MHHHHHHGGSGMGAYLVLLGPPGAGKGTQGRIISAKTGIPHISTGDILRDIVAKQNDEVASSIKEWMLKGELVPDEIGNAVVKRRLKEKDCEKGFILDGFPRTVRQAEYLDSFLESQGRQLTAAVLIEVPEDEVVARLLSRRVCPKCGRSYNMIFLPPKEDELCDDCGVSLVTRLDDKEETVRHRLKVYREKTQPVIDYYSKKGILARVDGSQEIRPIVAEVLGILGWSDK

SEQ ID NO: 2479 - DNA, 693 bp, synthetic construct
  misc_feature 1..693: note = variant of adenylate kinase from Thermotoga neapolitana
  source 1..693: mol_type = other DNA
atgcaccatcatcaccatcacgggggctccggcatgggggcatatctggtgttattaggtccgccgggcgcgggaaaaggtacccaaggccgtattatttcggcaaagactggcatcccgcatattagcacgggcgatatcctgcgtgacatcgtcgctaagcaaaacgatgaagttgcctcgagcattaaagagtggatgctgaaaggtgaactcgtttgtgatgaaattggtaatgcggtagtaaaacgccgcctgaaggagaaagactgcgaaaaaggctttattttggatggtttcccgcgtaccgtgcgccaagcggaatatctggatagttttcttgaaagccagggccgccagttgacagccgccgtgctgattgaggtccccgaagatgaagttgttgcacgtctgctgtctcgccgtgtttgtccgaaatgcgggcgtagttacaacatgatttttctgccaccaaaagaagacgagctgtgtgacgattgcggtgtcagcttagtacagcgtttagatgataaggaagaaacggtccgtcaccgcctgaaagtctaccgtgagaagacccagccggtcattgactattatagtaagaaaggtattctcgcacgcgtagatgggagccaagaaatccggcctatcgtggcagaagtcctggggattctgggttggagcgataag

SEQ ID NO: 2480 - protein, 231 aa, synthetic construct
  REGION 1..231: note = variant of adenylate kinase from Thermotoga neapolitana
MHHHHHHGGSGMGAYLVLLGPPGAGKGTQGRIISAKTGIPHISTGDILRDIVAKQNDEVASSIKEWMLKGELVCDEIGNAVVKRRLKEKDCEKGFILDGFPRTVRQAEYLDSFLESQGRQLTAAVLIEVPEDEVVARLLSRRVCPKCGRSYNMIFLPPKEDELCDDCGVSLVQRLDDKEETVRHRLKVYREKTQPVIDYYSKKGILARVDGSQEIRPIVAEVLGILGWSDK

SEQ ID NO: 2481 - DNA, 693 bp, synthetic construct
  misc_feature 1..693: note = variant of adenylate kinase from Thermotoga neapolitana
  source 1..693: mol_type = other DNA
atgcaccatcatcaccatcacgggggctccggcatgggggcatatctggtgttattaggtccgccgggcgcgggaaaaggtacccaaggccgtattatttcggcaaagactggcatcccgcatattagcacgggcgatatcctgcgtgacatcgtcgctaagcaaaacgatgaagttgcctcgagcattaaagagtggatgctgaaaggtgaactcgttccagatgaaattggtaatgcggtagtaaaacgccgcctgaaggagaaagactgcgaaaaaggctttattttggatggtttcccgcgtaccgtgcgccaagcggaatatctggatagttttcttgaaagccagggccgccagttgacagccgccgtgctgattgaggtccccgaagatgaagttgttgcacgtctgctgtctcgccgtgtttgtccgaaatgcgggcgtagttacaacatgatttttctgccaccaaaagaagacgagctgtgtgacgattgcggtgtcagcttagtacagcgtttagatgataaggaagaaacggtccgtcaccgcctgaaagtctaccgtgagaagacccagccggtcattgactattatagtaagaaaggtattctcgcacgcgtagatgggagccaagaaatccggcctatcgtggcagaagtcctggggattctgggtgtgagcgataag

SEQ ID NO: 2482 - protein, 231 aa, synthetic construct
  REGION 1..231: note = variant of adenylate kinase from Thermotoga neapolitana
MHHHHHHGGSGMGAYLVLLGPPGAGKGTQGRIISAKTGIPHISTGDILRDIVAKQNDEVASSIKEWMLKGELVPDEIGNAVVKRRLKEKDCEKGFILDGFPRTVRQAEYLDSFLESQGRQLTAAVLIEVPEDEVVARLLSRRVCPKCGRSYNMIFLPPKEDELCDDCGVSLVQRLDDKEETVRHRLKVYREKTQPVIDYYSKKGILARVDGSQEIRPIVAEVLGILGVSDK

SEQ ID NO: 2483 - DNA, 693 bp, synthetic construct
  misc_feature 1..693: note = variant of adenylate kinase from Thermotoga neapolitana
  source 1..693: mol_type = other DNA
atgcaccatcatcaccatcacgggggctccggcatgggggcatatctggtgttattaggtccgccgggcgcgggaaaaggtacccaaggccgtattatttcggcaaagactggcatcccgcatattagcacgggcgatatcctgcgtgacatcgtcgctaagcaaaacgatgaagttgcctcgagcattaaagagtggatgctgaaaggtgaactcgttccagatgaaattggtaatgcggtagtaaaacgccgcctgaaggagaaagactgcgaaaaaggctttattttggatggtttcccgcgtaccgtgcgccaagcggaatatctggatagttttcttgaaagccagggccgccagttgacagccgccgtgctgcttgaggtccccgaagatgaagttgttgcacgtctgctgtctcgccgtgtttgtccgaaatgcgggcgtagttacaacatgatttttctgccaccaaaagaagacgagctgtgtgacgattgcggtgtcagcttagtacagcgtttagatgataaggaagaaacggtccgtcaccgcctgaaagtctaccgtgagaagacccagccggtcattgactattatagtaagaaaggtattctcgcacgcgtagatgggagccaagaaatccggcctatcgtggcagaagtcctggggattctgggttggagcgataag

SEQ ID NO: 2484 - protein, 231 aa, synthetic construct
  REGION 1..231: note = variant of adenylate kinase from Thermotoga neapolitana
MHHHHHHGGSGMGAYLVLLGPPGAGKGTQGRIISAKTGIPHISTGDILRDIVAKQNDEVASSIKEWMLKGELVPDEIGNAVVKRRLKEKDCEKGFILDGFPRTVRQAEYLDSFLESQGRQLTAAVLLEVPEDEVVARLLSRRVCPKCGRSYNMIFLPPKEDELCDDCGVSLVQRLDDKEETVRHRLKVYREKTQPVIDYYSKKGILARVDGSQEIRPIVAEVLGILGWSDK

SEQ ID NO: 2485 - DNA, 693 bp, synthetic construct
  misc_feature 1..693: note = variant of adenylate kinase from Thermotoga neapolitana
  source 1..693: mol_type = other DNA
atgcaccatcatcaccatcacgggggctccggcatgggggcatatctggtgttattaggtccgccgggcgcgggaaaaggtacccaaggccgtattatttcggcaaagactggcatcccgcatattagcacgggcgatatcctgcgtgacatcgtcgctaagcaaaacgatgaagttgcctcgagcattaaagagtggatgctgaaaggtgaactcgttccagatgaaattggtaatttggtagtaaaacgccgcctgaaggagaaagactgcgaaaaaggctttattttggatggtttcccgcgtaccgtgcgccaagcggaatatctggatagttttcttgaaagccagggccgccagttgacagccgccgtgctgattgaggtccccgaagatgaagttgttgcacgtctgctgtctcgccgtgtttgtccgaaatgcgggcgtagttacaacatgatttttctgccaccaaaagaagacgagctgtgtgacgattgcggtgtcagcttagtacagcgtttagatgataaggaagaaacggtccgtcaccgcctgaaagtctaccgtgagaagacccagccggtcattgactattatagtaagaaaggtattctcgcacgcgtagatgggagccaagaaatccggcctatcgtggcagaagtcctggggattctgggttggagcgataag

SEQ ID NO: 2486 - protein, 231 aa, synthetic construct
  REGION 1..231: note = variant of adenylate kinase from Thermotoga neapolitana
MHHHHHHGGSGMGAYLVLLGPPGAGKGTQGRIISAKTGIPHISTGDILRDIVAKQNDEVASSIKEWMLKGELVPDEIGNLVVKRRLKEKDCEKGFILDGFPRTVRQAEYLDSFLESQGRQLTAAVLIEVPEDEVVARLLSRRVCPKCGRSYNMIFLPPKEDELCDDCGVSLVQRLDDKEETVRHRLKVYREKTQPVIDYYSKKGILARVDGSQEIRPIVAEVLGILGWSDK

SEQ ID NO: 2487 - DNA, 693 bp, synthetic construct
  misc_feature 1..693: note = variant of adenylate kinase from Thermotoga neapolitana
  source 1..693: mol_type = other DNA
atgcaccatcatcaccatcacgggggctccggcatgggggcatatctggtgttattaggtccgccgggcgcgggaaaaggtacccaaggccgtattatttcggcaaagactggcatcccgcatattagcacgggcgatatcctgcgtgacatcgtcgctaagggtaacgatgaagttgcctcgagcattaaagagtggatgctgaaaggtgaactcgttccagatgaaattggtaatgcggtagtaaaacgccgcctgaaggagaaagactgcgaaaaaggctttattttggatggtttcccgcgtaccgtgcgccaagcggaatatctggatagttttcttgaaagccagggccgccagttgacagccgccgtgctgattgaggtccccgaagatgaagttgttgcacgtctgctgtctcgccgtgtttgtccgaaatgcgggcgtagttacaacatgatttttctgccaccaaaagaagacgagctgtgtgacgattgcggtgtcagcttagtacagcgtttagatgataaggaagaaacggtccgtcaccgcctgaaagtctaccgtgagaagacccagccggtcattgactattatagtaagaaaggtattctcgcacgcgtagatgggagccaagaaatccggcctatcgtggcagaagtcctggggattctgggttggagcgataag

SEQ ID NO: 2488 - protein, 231 aa, synthetic construct
  REGION 1..231: note = variant of adenylate kinase from Thermotoga neapolitana
MHHHHHHGGSGMGAYLVLLGPPGAGKGTQGRIISAKTGIPHISTGDILRDIVAKGNDEVASSIKEWMLKGELVPDEIGNAVVKRRLKEKDCEKGFILDGFPRTVRQAEYLDSFLESQGRQLTAAVLIEVPEDEVVARLLSRRVCPKCGRSYNMIFLPPKEDELCDDCGVSLVQRLDDKEETVRHRLKVYREKTQPVIDYYSKKGILARVDGSQEIRPIVAEVLGILGWSDK

SEQ ID NO: 2489 - DNA, 693 bp, synthetic construct
  misc_feature 1..693: note = variant of adenylate kinase from Thermotoga neapolitana
  source 1..693: mol_type = other DNA
atgcaccatcatcaccatcacgggggctccggcatgggggcatatctggtgttattaggtccgccgggcgcgggaaaaggtacccaaggccgtattatttcggcaaagactggcatcccgcatattagcacgggcgatatcctgcgtgacatcgtcgctaagcaaaacgatgaagttgcctcgagcattaaagagtggatgctgaaaggtgaactcgttccagatgaaattggtaatgcggtagtaaaacgccgcctgaaggagaaagactgcgaaaaaggctttattttggatggtttcccgcgtaccgtgcgccaagcggaatatctggatagttttcttgaaagccagggccgccagttgacagccgccgtgctgattgaggtccccgaagatgaagttgttgcacgtctgctgtctcgccgtgtttgtccgaaatgcgggcgtagttacaacatgatttttctgccaccaaaagaagacgagctgtgtgacgattgcggtgtcagcttagtacagcgtttagatgataaggaagaaacggtccgtatgcgcctgaaagtctaccgtgagaagacccagccggtcattgactattatagtaagaaaggtattctcgcacgcgtagatgggagccaagaaatccggcctatcgtggcagaagtcctggggattctgggttggagcgataag

SEQ ID NO: 2490 - protein, 231 aa, synthetic construct
  REGION 1..231: note = variant of adenylate kinase from Thermotoga neapolitana
MHHHHHHGGSGMGAYLVLLGPPGAGKGTQGRIISAKTGIPHISTGDILRDIVAKQNDEVASSIKEWMLKGELVPDEIGNAVVKRRLKEKDCEKGFILDGFPRTVRQAEYLDSFLESQGRQLTAAVLIEVPEDEVVARLLSRRVCPKCGRSYNMIFLPPKEDELCDDCGVSLVQRLDDKEETVRMRLKVYREKTQPVIDYYSKKGILARVDGSQEIRPIVAEVLGILGWSDK

SEQ ID NO: 2491 - DNA, 693 bp, synthetic construct
  misc_feature 1..693: note = variant of adenylate kinase from Thermotoga neapolitana
  source 1..693: mol_type = other DNA
atgcaccatcatcaccatcacgggggctccggcatgggggcatatctggtgttattaggtccgccgggcgcgggaaaaggtacccaaggccgtattatttcggcaaagactggcatcccgcatattagcacgggcgatatcctgcgtgacatcgtcgctaagcaaaacgatgaagttgcctcgagcattaaagagtggatgctgaaaggtgaactcgttccagatgaaattggtaatgcggtagtaaaacgccgcctgaaggagaaagactgcgaaaaaggctttattttggatggtttcccgcgtaccgtgcgccaagcggaatatctggatagttttcttgaaagccagggccgccagttgacagccgccgtgctgattgaggtccccgaagatgaagttgttgttcgtctgctgtctcgccgtgtttgtccgaaatgcgggcgtagttacaacatgatttttctgccaccaaaagaagacgagctgtgtgacgattgcggtgtcagcttagtacagcgtttagatgataaggaagaaacggtccgtcaccgcctgaaagtctaccgtgagaagacccagccggtcattgactattatagtaagaaaggtattctcgcacgcgtagatgggagccaagaaatccggcctatcgtggcagaagtcctggggattctgggttggagcgataag

SEQ ID NO: 2492 - protein, 231 aa, synthetic construct
  REGION 1..231: note = variant of adenylate kinase from Thermotoga neapolitana
MHHHHHHGGSGMGAYLVLLGPPGAGKGTQGRIISAKTGIPHISTGDILRDIVAKQNDEVASSIKEWMLKGELVPDEIGNAVVKRRLKEKDCEKGFILDGFPRTVRQAEYLDSFLESQGRQLTAAVLIEVPEDEVVVRLLSRRVCPKCGRSYNMIFLPPKEDELCDDCGVSLVQRLDDKEETVRHRLKVYREKTQPVIDYYSKKGILARVDGSQEIRPIVAEVLGILGWSDK

SEQ ID NO: 2493 - DNA, 693 bp, synthetic construct
  misc_feature 1..693: note = variant of adenylate kinase from Thermotoga neapolitana
  source 1..693: mol_type = other DNA
atgcaccatcatcaccatcacgggggctccggcatgggggcatatctggtgttattaggtccgccgggcgcgggaaaaggtacccaaggccgtattatttcggcaaagactggcatcccgcatattagcacgggcgatatcctgcgtgacatcgtcgctaagcaaaacgatgaagttgcctcgagcattaaagagtggatgctgaaaggtgaactcgttccagatgaaattggtaatgcggtagtaaaacgccgcctgaaggagaaagactgcgaaaaaggctttattttggatggtttcccgcgtaccgtgcgccaagcggaatatctggatagttttcttgaaagccagggccgccagttgacagccgccgtgctgattgaggtccccgaagatgaagttgttgcacgtctgctgtctcgccgtgtttgtccgaaatgcgggcgtagttacaacatgatttttctgccaccaaaagaagacgagctgtgtgacgattgcggtgtcagcttagtacagcgtttagatgataaggaagaaacggtccgtcaccgcctgaaagtctaccgtgagaagacccagccggtcattgactattatagtaagaaaggtattctcgcacgcgtagatgggagccaagaaatccggcctatcgtggcagaagtcctggggattctgggtactagcgataag

SEQ ID NO: 2494 - protein, 231 aa, synthetic construct
  REGION 1..231: note = variant of adenylate kinase from Thermotoga neapolitana
MHHHHHHGGSGMGAYLVLLGPPGAGKGTQGRIISAKTGIPHISTGDILRDIVAKQNDEVASSIKEWMLKGELVPDEIGNAVVKRRLKEKDCEKGFILDGFPRTVRQAEYLDSFLESQGRQLTAAVLIEVPEDEVVARLLSRRVCPKCGRSYNMIFLPPKEDELCDDCGVSLVQRLDDKEETVRHRLKVYREKTQPVIDYYSKKGILARVDGSQEIRPIVAEVLGILGTSDK

SEQ ID NO: 2495 - DNA, 693 bp, synthetic construct
  misc_feature 1..693: note = variant of adenylate kinase from Thermotoga neapolitana
  source 1..693: mol_type = other DNA
atgcaccatcatcaccatcacgggggctccggcatgggggcatatctggtgttattaggtccgccgggcgcgggaaaaggtacccaaggccgtattatttcggcaaagactggcatcccgcatattagcacgggcgatatcctgcgtgacatcgtcgctaagcaaaacgatgaagttgcctcgagcattaaagagtggatgctgaaaggtgaactcgttccagatgaaattggtaatgcggtagtaaaacgccgcctgaaggagaaagactgcgaaaaaggctttattttggatggtttcccgcgtaccgtgcgccaagcggaatatctggatagttttcttgaaagccagggccgccagttgacagccgccgtgctgattgaggtccccgaagatgaagttgttgcacgtctgctgtctcgccgtgtttgtccgaaatgcaggcgtagttacaacatgatttttctgccaccaaaagaagacgagctgtgtgacgattgcggtgtcagcttagtacagcgtttagatgataaggaagaaacggtccgtcaccgcctgaaagtctaccgtgagaagacccagccggtcattgactattatagtaagaaaggtattctcgcacgcgtagatgggagccaagaaatccggcctatcgtggcagaagtcctggggattctgggttggagcgataag

SEQ ID NO: 2496 - protein, 231 aa, synthetic construct
  REGION 1..231: note = variant of adenylate kinase from Thermotoga neapolitana
MHHHHHHGGSGMGAYLVLLGPPGAGKGTQGRIISAKTGIPHISTGDILRDIVAKQNDEVASSIKEWMLKGELVPDEIGNAVVKRRLKEKDCEKGFILDGFPRTVRQAEYLDSFLESQGRQLTAAVLIEVPEDEVVARLLSRRVCPKCRRSYNMIFLPPKEDELCDDCGVSLVQRLDDKEETVRHRLKVYREKTQPVIDYYSKKGILARVDGSQEIRPIVAEVLGILGWSDK

SEQ ID NO: 2497 - DNA, 693 bp, synthetic construct
  misc_feature 1..693: note = variant of adenylate kinase from Thermotoga neapolitana
  source 1..693: mol_type = other DNA
atgcaccatcatcaccatcacgggggctccggcatgggggcatatctggtgttattaggtccgccgggcgcgggaaaaggtacccaaggccgtattatttcggcaaagactggcatcccgcatattagcacgggcgatatcctgcgtgacatcgtcgctaagcaaaacgatgaagttgcctcgagcattaaagagtggatgctgaaaggtgaactcgttccagatgaaattggtaatgcggtagtaaaacgccgcctgaagacgaaagactgcgaaaaaggctttattttggatggtttcccgcgtaccgtgcgccaagcggaatatctggatagttttcttgaaagccagggccgccagttgacagccgccgtgctgattgaggtccccgaagatgaagttgttgcacgtctgctgtctcgccgtgtttgtccgaaatgcgggcgtagttacaacatgatttttctgccaccaaaagaagacgagctgtgtgacgattgcggtgtcagcttagtacagcgtttagatgataaggaagaaacggtccgtcaccgcctgaaagtctaccgtgagaagacccagccggtcattgactattatagtaagaaaggtattctcgcacgcgtagatgggagccaagaaatccggcctatcgtggcagaagtcctggggattctgggttggagcgataag

SEQ ID NO: 2498 - protein, 231 aa, synthetic construct
  REGION 1..231: note = variant of adenylate kinase from Thermotoga neapolitana
MHHHHHHGGSGMGAYLVLLGPPGAGKGTQGRIISAKTGIPHISTGDILRDIVAKQNDEVASSIKEWMLKGELVPDEIGNAVVKRRLKTKDCEKGFILDGFPRTVRQAEYLDSFLESQGRQLTAAVLIEVPEDEVVARLLSRRVCPKCGRSYNMIFLPPKEDELCDDCGVSLVQRLDDKEETVRHRLKVYREKTQPVIDYYSKKGILARVDGSQEIRPIVAEVLGILGWSDK

SEQ ID NO: 2499 - DNA, 693 bp, synthetic construct
  misc_feature 1..693: note = variant of adenylate kinase from Thermotoga neapolitana
  source 1..693: mol_type = other DNA
atgcaccatcatcaccatcacgggggctccggcatgggggcatatctggtgttattaggtccgccgggcgcgggaaaaggtacccaaggccgtattatttcggcaaagactggcatcccgcatattagcacgggcgatatcctgcgtgacatcgtcgctaagcaaaacgatgaagttgcctcgagcattaaagagtggatgctgaaaggtgaactcgttccagatgaaattggtaatgcggtagtaaaacgccgcctgaaggagaaagactgcgaaaaaggctttattttggatggtttcccgcgtaccgtgcgccaagcggaatatctggatagttttcttgaaagccagggccgccagttgacagccgccgtgctgattgaggtccccgaagatgaagttgttgcacgtctgctgtctcgccgtgtttgtccgaaatgcgggcgtagttacaacatgatttttctgccaccaaaagaagacgagctgtgtgacgattgcggtgtcagcttagtacagcgtttagatgataaggaagaaacggtccgtcaccgcctgaaagtctaccgtgagaagacccagccggtcattgactattatagtaagaaaggtattctcgcacgcgtagatgggagccaagaaatccggcctatcgtggcagaagtcctggggattctgggtcagagcgataag

SEQ ID NO: 2500 - protein, 231 aa, synthetic construct
  REGION 1..231: note = variant of adenylate kinase from Thermotoga neapolitana
MHHHHHHGGSGMGAYLVLLGPPGAGKGTQGRIISAKTGIPHISTGDILRDIVAKQNDEVASSIKEWMLKGELVPDEIGNAVVKRRLKEKDCEKGFILDGFPRTVRQAEYLDSFLESQGRQLTAAVLIEVPEDEVVARLLSRRVCPKCGRSYNMIFLPPKEDELCDDCGVSLVQRLDDKEETVRHRLKVYREKTQPVIDYYSKKGILARVDGSQEIRPIVAEVLGILGQSDK

SEQ ID NO: 2501 - DNA, 693 bp, synthetic construct
  misc_feature 1..693: note = variant of adenylate kinase from Thermotoga neapolitana
  source 1..693: mol_type = other DNA
atgcaccatcatcaccatcacgggggctccggcatgggggcatatctggtgttattaggtccgccgggcgcgggaaaaggtacccaaggccgtattatttcggcaaagactggcatcccgcatattagcacgggcgatatcctgcgtgacatcgtcgctaagcaaaacgatgaagttgcctcgagcattaaagagtcgatgctgaaaggtgaactcgttccagatgaaattggtaatgcggtagtaaaacgccgcctgaaggagaaagactgcgaaaaaggctttattttggatggtttcccgcgtaccgtgcgccaagcggaatatctggatagttttcttgaaagccagggccgccagttgacagccgccgtgctgattgaggtccccgaagatgaagttgttgcacgtctgctgtctcgccgtgtttgtccgaaatgcgggcgtagttacaacatgatttttctgccaccaaaagaagacgagctgtgtgacgattgcggtgtcagcttagtacagcgtttagatgataaggaagaaacggtccgtcaccgcctgaaagtctaccgtgagaagacccagccggtcattgactattatagtaagaaaggtattctcgcacgcgtagatgggagccaagaaatccggcctatcgtggcagaagtcctggggattctgggttggagcgataag

SEQ ID NO: 2502 - protein, 231 aa, synthetic construct
  REGION 1..231: note = variant of adenylate kinase from Thermotoga neapolitana
MHHHHHHGGSGMGAYLVLLGPPGAGKGTQGRIISAKTGIPHISTGDILRDIVAKQNDEVASSIKESMLKGELVPDEIGNAVVKRRLKEKDCEKGFILDGFPRTVRQAEYLDSFLESQGRQLTAAVLIEVPEDEVVARLLSRRVCPKCGRSYNMIFLPPKEDELCDDCGVSLVQRLDDKEETVRHRLKVYREKTQPVIDYYSKKGILARVDGSQEIRPIVAEVLGILGWSDK

SEQ ID NO: 2503 - DNA, 693 bp, synthetic construct
  misc_feature 1..693: note = variant of adenylate kinase from Thermotoga neapolitana
  source 1..693: mol_type = other DNA
atgcaccatcatcaccatcacgggggctccggcatgggggcatatctggtgttattaggtccgccgggcgcgggaaaaggtacccaaggccgtattatttcggcaaagactggcatcccgcatattagcacgggcgatatcctgcgtgacatcgtcgctaagcaaaacgatgaagttgcctcgagcattaaagagtggatgctgaaaggtgaactcgttccagatgaaattggtaatgcggtagtaaaacgccgcctgaaggagaaagactgcgaaaaaggctttattttggatggtttcccgcgtaccgtgcgccaagcggaatatctggatagttttcttgaaagccagggccgccagttgacagccgccgtgctgattgaggtccccgaagatgaagttgttgcacgtctgctgtctcgccgtgtttgtccgaaatgcgggcgtagttacaacatgatttttctgccaccaaaagaagacgagctgtgtgacgattgcggtgtcagcttagtacagcgtttagatgataaggaagaaacggtccgtcaccgcctgaaagtctaccgtgagaagacccagccggtcattgactattatagtaagaaaggtattctcgcacgcgtagatgggagccaagaagttcggcctatcgtggcagaagtcctggggattctgggttggagcgataag

SEQ ID NO: 2504 - protein, 231 aa, synthetic construct
  REGION 1..231: note = variant of adenylate kinase from Thermotoga neapolitana
MHHHHHHGGSGMGAYLVLLGPPGAGKGTQGRIISAKTGIPHISTGDILRDIVAKQNDEVASSIKEWMLKGELVPDEIGNAVVKRRLKEKDCEKGFILDGFPRTVRQAEYLDSFLESQGRQLTAAVLIEVPEDEVVARLLSRRVCPKCGRSYNMIFLPPKEDELCDDCGVSLVQRLDDKEETVRHRLKVYREKTQPVIDYYSKKGILARVDGSQEVRPIVAEVLGILGWSDK

SEQ ID NO: 2505 - DNA, 693 bp, synthetic construct
  misc_feature 1..693: note = variant of adenylate kinase from Thermotoga neapolitana
  source 1..693: mol_type = other DNA
atgcaccatcatcaccatcacgggggctccggcatgggggcatatctggtgttattaggtccgccgggcgcgggaaaaggtacccaaggccgtattatttcggcaaagactggcatcccgcatattagcacgggcgatatcctgcgtgacatcgtcgctaagcaaaacgatgaagttgcctcgagcattaaagagtggatgctgaaaggtgaactcgttccagatgaaattggtaatgcggtagtaaaacgccgcctgaaggagaaagactgcgaaaaaggctttattttggatggtttcccgcgtaccgtgcgccaagcggaatatctggatagttttcttgaaagccagggccgccagttgacagccgccgtgctgattgaggtccccgaagatgaagttgttgcacgtctgctgtctcgccgtgtttgtccgaaatgcgggcgtagttacaacatgatttttctgccaccaaaagaagacgagctgtgtgacgattgcggtgtcagcttagtacagcgtttagatgataaggaagaaacggtccgtcaccgcctgaaagtctaccgtgagaagacccagagggtcattgactattatagtaagaaaggtattctcgcacgcgtagatgggagccaagaaatccggcctatcgtggcagaagtcctggggattctgggttggagcgataag

SEQ ID NO: 2506 - protein, 231 aa, synthetic construct
  REGION 1..231: note = variant of adenylate kinase from Thermotoga neapolitana
MHHHHHHGGSGMGAYLVLLGPPGAGKGTQGRIISAKTGIPHISTGDILRDIVAKQNDEVASSIKEWMLKGELVPDEIGNAVVKRRLKEKDCEKGFILDGFPRTVRQAEYLDSFLESQGRQLTAAVLIEVPEDEVVARLLSRRVCPKCGRSYNMIFLPPKEDELCDDCGVSLVQRLDDKEETVRHRLKVYREKTQRVIDYYSKKGILARVDGSQEIRPIVAEVLGILGWSDK

SEQ ID NO: 2507 - DNA, 693 bp, synthetic construct
  misc_feature 1..693: note = variant of adenylate kinase from Thermotoga neapolitana
  source 1..693: mol_type = other DNA
atgcaccatcatcaccatcacgggggctccggcatgggggcatatctggtgttattaggtccgccgggcgcgggaaaaggtacccaaggccgtattatttcggcaaagactggcatcccgcatattagcacgggcgatatcctgcgtgacatcgtcgctaagcaaaacgatgaagttgcctcgagcattaaagagtggatgctgaaaggtgaactcgttccagatgaaattggtaatgcggtagtaaaacgccgcctgaaggagaaagactgcgaaaaaggctttattttggatggtttcccgcgtaccgtgcgccaagcggaatatctggatagttttcttgaaagccagggccgccagttgacagccgccgtgctgattgaggtccccgaagatgaagttgttgcacgtctgctgtctcgccgtgtttgtccgaaatgcgggcgtagttacaacatgatttttctgccaccaaaagaagacgagctgtgtgacgattgcggtgtcagcttagtacagcgtttagatgataaggaagaaacggtccgtcaccgcctgaaagtctacggtgagaagacccagccggtcattgactattatagtaagaaaggtattctcgcacgcgtagatgggagccaagaaatccggcctatcgtggcagaagtcctggggattctgggttggagcgataag

SEQ ID NO: 2508 - protein, 231 aa, synthetic construct
  REGION 1..231: note = variant of adenylate kinase from Thermotoga neapolitana
MHHHHHHGGSGMGAYLVLLGPPGAGKGTQGRIISAKTGIPHISTGDILRDIVAKQNDEVASSIKEWMLKGELVPDEIGNAVVKRRLKEKDCEKGFILDGFPRTVRQAEYLDSFLESQGRQLTAAVLIEVPEDEVVARLLSRRVCPKCGRSYNMIFLPPKEDELCDDCGVSLVQRLDDKEETVRHRLKVYGEKTQPVIDYYSKKGILARVDGSQEIRPIVAEVLGILGWSDK

SEQ ID NO: 2509 - DNA, 693 bp, synthetic construct
  misc_feature 1..693: note = variant of adenylate kinase from Thermotoga neapolitana
  source 1..693: mol_type = other DNA
atgcaccatcatcaccatcacgggggctccggcatgggggcatatctggtgttattaggtccgccgggcgcgggaaaaggtacccaaggccgtattatttcggcaaagactggcatcccgcatattagcacgggcgatatcctgcgtgacatcgtcgctaagcaaaacgatgaagttgcctcgagcattcgtgagtggatgctgaaaggtgaactcgttccagatgaaattggtaatgcggtagtaaaacgccgcctgaaggagaaagactgcgaaaaaggctttattttggatggtttcccgcgtaccgtgcgccaagcggaatatctggatagttttcttgaaagccagggccgccagttgacagccgccgtgctgattgaggtccccgaagatgaagttgttgcacgtctgctgtctcgccgtgtttgtccgaaatgcgggcgtagttacaacatgatttttctgccaccaaaagaagacgagctgtgtgacgattgcggtgtcagcttagtacagcgtttagatgataaggaagaaacggtccgtcaccgcctgaaagtctaccgtgagaagacccagccggtcattgactattatagtaagaaaggtattctcgcacgcgtagatgggagccaagaaatccggcctatcgtggcagaagtcctggggattctgggttggagcgataag

SEQ ID NO: 2510 - protein, 231 aa, synthetic construct
  REGION 1..231: note = variant of adenylate kinase from Thermotoga neapolitana
MHHHHHHGGSGMGAYLVLLGPPGAGKGTQGRIISAKTGIPHISTGDILRDIVAKQNDEVASSIREWMLKGELVPDEIGNAVVKRRLKEKDCEKGFILDGFPRTVRQAEYLDSFLESQGRQLTAAVLIEVPEDEVVARLLSRRVCPKCGRSYNMIFLPPKEDELCDDCGVSLVQRLDDKEETVRHRLKVYREKTQPVIDYYSKKGILARVDGSQEIRPIVAEVLGILGWSDK

SEQ ID NO: 2511 - DNA, 693 bp, synthetic construct
  misc_feature 1..693: note = variant of adenylate kinase from Thermotoga neapolitana
  source 1..693: mol_type = other DNA
atgcaccatcatcaccatcacgggggctccggcatgggggcatatctggtgttattaggtccgccgggcgcgggaaaaggtacccaaggccgtattatttcggcaaagactggcatcccgcatattagcacgggcgatatcctgcgtgacatcgtcgctaagcaaaacgatgaagttgcctcgagcattaaagagtggatgctgaaaggtgaactcgttccagatgaaattggtaatgcggtagtaaaacgccgcctgaaggagaaagactgcgaaaaaggctttattttggatggtttcccgcgtaccgtgcgccaagcggaatatctggatagttttcttgaaagccagggccgccagttgacagccgccgtgctgattgaggtccccgaagatgaagttgttgcacgtctgctgtctcgccgtgtttgtccgaaatgcgggcgtagttacaacatgatttttctgccaccaaaagaagacgagctgtgtgacgattgcggtgtcagcttagtacagcgtttagatgataaggaagaaacggtccgtcggcgcctgaaagtctaccgtgagaagacccagccggtcattgactattatagtaagaaaggtattctcgcacgcgtagatgggagccaagaaatccggcctatcgtggcagaagtcctggggattctgggttggagcgataag

SEQ ID NO: 2512 - protein, 231 aa, synthetic construct
  REGION 1..231: note = variant of adenylate kinase from Thermotoga neapolitana
MHHHHHHGGSGMGAYLVLLGPPGAGKGTQGRIISAKTGIPHISTGDILRDIVAKQNDEVASSIKEWMLKGELVPDEIGNAVVKRRLKEKDCEKGFILDGFPRTVRQAEYLDSFLESQGRQLTAAVLIEVPEDEVVARLLSRRVCPKCGRSYNMIFLPPKEDELCDDCGVSLVQRLDDKEETVRRRLKVYREKTQPVIDYYSKKGILARVDGSQEIRPIVAEVLGILGWSDK

SEQ ID NO: 2513 - DNA, 693 bp, synthetic construct
  misc_feature 1..693: note = variant of adenylate kinase from Thermotoga neapolitana
  source 1..693: mol_type = other DNA
atgcaccatcatcaccatcacgggggctccggcatgggggcatatctggtgttattaggtccgccgggcgcgggaaaaggtacccaaggccgtattatttcggcaaagactggcatcccgcatattagcacgggcgatatcctgcgtgacatcgtcgctaagcaaaacgatgaagttgcctcgagcattaaagagtggatgctgaaaggtgaactcgttccagatgaaattggtaatgcggtagtaaaacgccgcctgaaggagaaagactgcgaaaaaggctttattttggatggtttcccgcgtaccgtgcgccaagcggaatatctggatagttttcttgaaagccagggccgccagttggctgccgccgtgctgattgaggtccccgaagatgaagttgttgcacgtctgctgtctcgccgtgtttgtccgaaatgcgggcgtagttacaacatgatttttctgccaccaaaagaagacgagctgtgtgacgattgcggtgtcagcttagtacagcgtttagatgataaggaagaaacggtccgtcaccgcctgaaagtctaccgtgagaagacccagccggtcattgactattatagtaagaaaggtattctcgcacgcgtagatgggagccaagaaatccggcctatcgtggcagaagtcctggggattctgggttggagcgataag

SEQ ID NO: 2514 - protein, 231 aa, synthetic construct
  REGION 1..231: note = variant of adenylate kinase from Thermotoga neapolitana
MHHHHHHGGSGMGAYLVLLGPPGAGKGTQGRIISAKTGIPHISTGDILRDIVAKQNDEVASSIKEWMLKGELVPDEIGNAVVKRRLKEKDCEKGFILDGFPRTVRQAEYLDSFLESQGRQLAAAVLIEVPEDEVVARLLSRRVCPKCGRSYNMIFLPPKEDELCDDCGVSLVQRLDDKEETVRHRLKVYREKTQPVIDYYSKKGILARVDGSQEIRPIVAEVLGILGWSDK

SEQ ID NO: 2515 - DNA, 693 bp, synthetic construct
  misc_feature 1..693: note = variant of adenylate kinase from Thermotoga neapolitana
  source 1..693: mol_type = other DNA
atgcaccatcatcaccatcacgggggctccggcatgggggcatatctggtgttattaggtccgccgggcgcgggaaaaggtacccaaggccgtattatttcggcaaagactggcatcccgcatattagcacgggcgatatcctgcgtagtatcgtcgctaagcaaaacgatgaagttgcctcgagcattaaagagtggatgctgaaaggtgaactcgttccagatgaaattggtaatgcggtagtaaaacgccgcctgaaggagaaagactgcgaaaaaggctttattttggatggtttcccgcgtaccgtgcgccaagcggaatatctggatagttttcttgaaagccagggccgccagttgacagccgccgtgctgattgaggtccccgaagatgaagttgttgcacgtctgctgtctcgccgtgtttgtccgaaatgcgggcgtagttacaacatgatttttctgccaccaaaagaagacgagctgtgtgacgattgcggtgtcagcttagtacagcgtttagatgataaggaagaaacggtccgtcaccgcctgaaagtctaccgtgagaagacccagccggtcattgactattatagtaagaaaggtattctcgcacgcgtagatgggagccaagaaatccggcctatcgtggcagaagtcctggggattctgggttggagcgataag

SEQ ID NO: 2516 - protein, 231 aa, synthetic construct
  REGION 1..231: note = variant of adenylate kinase from Thermotoga neapolitana
MHHHHHHGGSGMGAYLVLLGPPGAGKGTQGRIISAKTGIPHISTGDILRSIVAKQNDEVASSIKEWMLKGELVPDEIGNAVVKRRLKEKDCEKGFILDGFPRTVRQAEYLDSFLESQGRQLTAAVLIEVPEDEVVARLLSRRVCPKCGRSYNMIFLPPKEDELCDDCGVSLVQRLDDKEETVRHRLKVYREKTQPVIDYYSKKGILARVDGSQEIRPIVAEVLGILGWSDK

SEQ ID NO: 2517 - DNA, 693 bp, synthetic construct
  misc_feature 1..693: note = variant of adenylate kinase from Thermotoga neapolitana
  source 1..693: mol_type = other DNA
atgcaccatcatcaccatcacgggggctccggcatgggggcatatctggtgttattaggtccgccgggcgcgggaaaaggtacccaaggccgtattatttcggcaaagactggcatcccgcatattagcacgggcgatatcctgcgtgacatcgtcgctaagcaaaacgatgaagttgcctcgagcattaaagagtggatgctgaaaggtgaactcgttccagatgaaattggtaatgcggtagtaaaacgccgcctgaaggagaaagactgcgaaaaaggctttattttggatggtttcccgcgtaccgtgcgccaagcggaatatctggatagttttcttgaaagccagggccgccagttgacagccgccgtgctgattgaggtccccgaagatgaagttgttgcacgtctgctgtctcgcatggtttgtccgaaatgcgggcgtagttacaacatgatttttctgccaccaaaagaagacgagctgtgtgacgattgcggtgtcagcttagtacagcgtttagatgataaggaagaaacggtccgtcaccgcctgaaagtctaccgtgagaagacccagccggtcattgactattatagtaagaaaggtattctcgcacgcgtagatgggagccaagaaatccggcctatcgtggcagaagtcctggggattctgggttggagcgataag

SEQ ID NO: 2518 - protein, 231 aa, synthetic construct
  REGION 1..231: note = variant of adenylate kinase from Thermotoga neapolitana
MHHHHHHGGSGMGAYLVLLGPPGAGKGTQGRIISAKTGIPHISTGDILRDIVAKQNDEVASSIKEWMLKGELVPDEIGNAVVKRRLKEKDCEKGFILDGFPRTVRQAEYLDSFLESQGRQLTAAVLIEVPEDEVVARLLSRMVCPKCGRSYNMIFLPPKEDELCDDCGVSLVQRLDDKEETVRHRLKVYREKTQPVIDYYSKKGILARVDGSQEIRPIVAEVLGILGWSDK

SEQ ID NO: 2519 - DNA, 693 bp, synthetic construct
  misc_feature 1..693: note = variant of adenylate kinase from Thermotoga neapolitana
  source 1..693: mol_type = other DNA
atgcaccatcatcaccatcacgggggctccggcatgggggcatatctggtgttattaggtccgccgggcgcgggaaaaggtacccaaggccgtattatttcggcaaagactggcatcccgcatattagcacgggcgatatcctgcgtgacatcgtcgctaagcaaaacgatgaagttgcctcgagcattaaagagtggatgctgaaaggtgaactcgttccagatgaaattggtaatgcggtagtaaaacgccgcctgaaggagaaagactgcgaaaaaggctttattttggatggtttcccgcgtaccgtgcgccaagcggaatatctggatagttttcttgaaagccagggccgccagttgacagccgccgtgctgattgaggtccccgaagatgaagttgttgcacgtctgctgtctcgccgtgtttgtccgaaatgcgggcgtagttacaacatgatttggctgccaccaaaagaagacgagctgtgtgacgattgcggtgtcagcttagtacagcgtttagatgataaggaagaaacggtccgtcaccgcctgaaagtctaccgtgagaagacccagccggtcattgactattatagtaagaaaggtattctcgcacgcgtagatgggagccaagaaatccggcctatcgtggcagaagtcctggggattctgggttggagcgataag

SEQ ID NO: 2520 - protein, 231 aa, synthetic construct
  REGION 1..231: note = variant of adenylate kinase from Thermotoga neapolitana
MHHHHHHGGSGMGAYLVLLGPPGAGKGTQGRIISAKTGIPHISTGDILRDIVAKQNDEVASSIKEWMLKGELVPDEIGNAVVKRRLKEKDCEKGFILDGFPRTVRQAEYLDSFLESQGRQLTAAVLIEVPEDEVVARLLSRRVCPKCGRSYNMIWLPPKEDELCDDCGVSLVQRLDDKEETVRHRLKVYREKTQPVIDYYSKKGILARVDGSQEIRPIVAEVLGILGWSDK

SEQ ID NO: 2521 - DNA, 693 bp, synthetic construct
  misc_feature 1..693: note = variant of adenylate kinase from Thermotoga neapolitana
  source 1..693: mol_type = other DNA
atgcaccatcatcaccatcacgggggctccggcatgggggcatatctggtgttattaggtccgccgggcgcgggaaaaggtacccaaggccgtattatttcggcaaagactggcatcccgcatattagcacgggcgatatcctgcgtgacatcgtcgctaagcaaaacgatgaagttgcctcgagcattaaagagtggatgctgaaaggtgaactcgttccagatgaaattggtaattctgtagtaaaacgccgcctgaaggagaaagactgcgaaaaaggctttattttggatggtttcccgcgtaccgtgcgccaagcggaatatctggatagttttcttgaaagccagggccgccagttgacagccgccgtgctgattgaggtccccgaagatgaagttgttgcacgtctgctgtctcgccgtgtttgtccgaaatgcgggcgtagttacaacatgatttttctgccaccaaaagaagacgagctgtgtgacgattgcggtgtcagcttagtacagcgtttagatgataaggaagaaacggtccgtcaccgcctgaaagtctaccgtgagaagacccagccggtcattgactattatagtaagaaaggtattctcgcacgcgtagatgggagccaagaaatccggcctatcgtggcagaagtcctggggattctgggttggagcgataag

SEQ ID NO: 2522 - protein, 231 aa, synthetic construct
  REGION 1..231: note = variant of adenylate kinase from Thermotoga neapolitana
MHHHHHHGGSGMGAYLVLLGPPGAGKGTQGRIISAKTGIPHISTGDILRDIVAKQNDEVASSIKEWMLKGELVPDEIGNSVVKRRLKEKDCEKGFILDGFPRTVRQAEYLDSFLESQGRQLTAAVLIEVPEDEVVARLLSRRVCPKCGRSYNMIFLPPKEDELCDDCGVSLVQRLDDKEETVRHRLKVYREKTQPVIDYYSKKGILARVDGSQEIRPIVAEVLGILGWSDK

SEQ ID NO: 2523 - DNA, 693 bp, synthetic construct
  misc_feature 1..693: note = variant of adenylate kinase from Thermotoga neapolitana
  source 1..693: mol_type = other DNA
atgcaccatcatcaccatcacgggggctccggcatgggggcatatctggtgttattaggtccgccgggcgcgggaaaaggtacccaaggccgtattatttcggcaaagactggcatcccgcatattagcacgggcgatatcctgcgtgacatcgtcgctaagcaaaacgatgaagttgcctcgagcattaaagagtggatgctgaaaggtgaactcgttccagatgaaattggtaatgcggtagtaaaacgccgcctgaaggagaaagactgcgaaaaaggctttattttggatggtttcccgcgtaccgtgcgccaagcggaatatctggatagttttcttgaaagccagggccgccagttgacagccgccgtgctgattgaggtccccgaagatgaagttgttgcacgtctgctgtctcgccgtgtttgtccgaaatgcgggcgtagttacaacatgatttttctgccaccaaaagaagacgagctgtgtgacgattgcggtgtcagcttagtacagcgtttagatgataaggaagaaacggtccgtcaccgcctgaaagtctaccgtgagaagacccagccggtcattgactattatagtaagaaaggtattctcgcacgcgtagatgggagccaagaaatcggtcctatcgtggcagaagtcctggggattctgggttggagcgataag

SEQ ID NO: 2524 - protein, 231 aa, synthetic construct
  REGION 1..231: note = variant of adenylate kinase from Thermotoga neapolitana
MHHHHHHGGSGMGAYLVLLGPPGAGKGTQGRIISAKTGIPHISTGDILRDIVAKQNDEVASSIKEWMLKGELVPDEIGNAVVKRRLKEKDCEKGFILDGFPRTVRQAEYLDSFLESQGRQLTAAVLIEVPEDEVVARLLSRRVCPKCGRSYNMIFLPPKEDELCDDCGVSLVQRLDDKEETVRHRLKVYREKTQPVIDYYSKKGILARVDGSQEIGPIVAEVLGILGWSDK

SEQ ID NO: 2525 - DNA, 693 bp, synthetic construct
  misc_feature 1..693: note = variant of adenylate kinase from Thermotoga neapolitana
  source 1..693: mol_type = other DNA
atgcaccatcatcaccatcacgggggctccggcatgggggcatatctggtgttattaggtccgccgggcgcgggaaaaggtacccaaggccgtattatttcggcaaagactggcatcccgcatattagcacgggcgatatcctgcgtgacatcgtcgctaagcaaaacgatgaagttgcctcgagcattaaagagtggatgctgaaaggtgaactcgttccagatgaaattggtaatgcggtagtaaaacgccgcctgaaggagaaagactgcgaaaaaggctttattttggatggtttcccgcgtaccgtgcgccaagcggaatatctggatagttttcttgaagctcagggccgccagttgacagccgccgtgctgattgaggtccccgaagatgaagttgttgcacgtctgctgtctcgccgtgtttgtccgaaatgcgggcgtagttacaacatgatttttctgccaccaaaagaagacgagctgtgtgacgattgcggtgtcagcttagtacagcgtttagatgataaggaagaaacggtccgtcaccgcctgaaagtctaccgtgagaagacccagccggtcattgactattatagtaagaaaggtattctcgcacgcgtagatgggagccaagaaatccggcctatcgtggcagaagtcctggggattctgggttggagcgataag

SEQ ID NO: 2526 - protein, 231 aa, synthetic construct
  REGION 1..231: note = variant of adenylate kinase from Thermotoga neapolitana
MHHHHHHGGSGMGAYLVLLGPPGAGKGTQGRIISAKTGIPHISTGDILRDIVAKQNDEVASSIKEWMLKGELVPDEIGNAVVKRRLKEKDCEKGFILDGFPRTVRQAEYLDSFLEAQGRQLTAAVLIEVPEDEVVARLLSRRVCPKCGRSYNMIFLPPKEDELCDDCGVSLVQRLDDKEETVRHRLKVYREKTQPVIDYYSKKGILARVDGSQEIRPIVAEVLGILGWSDK

SEQ ID NO: 2527 - DNA, 693 bp, synthetic construct
  misc_feature 1..693: note = variant of adenylate kinase from Thermotoga neapolitana
  source 1..693: mol_type = other DNA
atgcaccatcatcaccatcacgggggctccggcatgggggcatatctggtgttattaggtccgccgggcgcgggaaaaggtacccaaggccgtattatttcggcaaagactggcatcccgcatattagcacgggcgatatcctgcgtgacatcgtcgctaagcaaaacgatgaagttgcctcgagcattaaagagtggatgctgaaaggtgaactcgttccagatgaaattggtaatgcggtagtaaaacgccgcctgaaggagaaatgttgcgaaaaaggctttattttggatggtttcccgcgtaccgtgcgccaagcggaatatctggatagttttcttgaaagccagggccgccagttgacagccgccgtgctgattgaggtccccgaagatgaagttgttgcacgtctgctgtctcgccgtgtttgtccgaaatgcgggcgtagttacaacatgatttttctgccaccaaaagaagacgagctgtgtgacgattgcggtgtcagcttagtacagcgtttagatgataaggaagaaacggtccgtcaccgcctgaaagtctaccgtgagaagacccagccggtcattgactattatagtaagaaaggtattctcgcacgcgtagatgggagccaagaaatccggcctatcgtggcagaagtcctggggattctgggttggagcgataag

SEQ ID NO: 2528 - protein, 231 aa, synthetic construct
  REGION 1..231: note = variant of adenylate kinase from Thermotoga neapolitana
MHHHHHHGGSGMGAYLVLLGPPGAGKGTQGRIISAKTGIPHISTGDILRDIVAKQNDEVASSIKEWMLKGELVPDEIGNAVVKRRLKEKCCEKGFILDGFPRTVRQAEYLDSFLESQGRQLTAAVLIEVPEDEVVARLLSRRVCPKCGRSYNMIFLPPKEDELCDDCGVSLVQRLDDKEETVRHRLKVYREKTQPVIDYYSKKGILARVDGSQEIRPIVAEVLGILGWSDK

SEQ ID NO: 2529 - DNA, 693 bp, synthetic construct
  misc_feature 1..693: note = variant of adenylate kinase from Thermotoga neapolitana
  source 1..693: mol_type = other DNA
atgcaccatcatcaccatcacgggggctccggcatgggggcatatctggtgttattaggtccgccgggcgcgggaaaaggtacccaaggccgtattatttcggcaaagactggcatcccgcatattagcacgggcgatatcctgcgtgacatcgtcgctaagcaaaacgatgaagttgcctcgagcattaaagagtggatgctgaaaggtgaactcgttccagatgaaattggtaatgcggtagtaaaacgccgcctgaaggagaaagactgcgaaaaaggctttattttggatggtttcccgcgtaccgtgcgccaagcggaatatctggatagttttcttgaaagccagggccgccagttgacagccgccgtgctgattgaggtccccgaaaaggaagttgttgcacgtctgctgtctcgccgtgtttgtccgaaatgcgggcgtagttacaacatgatttttctgccaccaaaagaagacgagctgtgtgacgattgcggtgtcagcttagtacagcgtttagatgataaggaagaaacggtccgtcaccgcctgaaagtctaccgtgagaagacccagccggtcattgactattatagtaagaaaggtattctcgcacgcgtagatgggagccaagaaatccggcctatcgtggcagaagtcctggggattctgggttggagcgataag

SEQ ID NO: 2530 - protein, 231 aa, synthetic construct
  REGION 1..231: note = variant of adenylate kinase from Thermotoga neapolitana
MHHHHHHGGSGMGAYLVLLGPPGAGKGTQGRIISAKTGIPHISTGDILRDIVAKQNDEVASSIKEWMLKGELVPDEIGNAVVKRRLKEKDCEKGFILDGFPRTVRQAEYLDSFLESQGRQLTAAVLIEVPEKEVVARLLSRRVCPKCGRSYNMIFLPPKEDELCDDCGVSLVQRLDDKEETVRHRLKVYREKTQPVIDYYSKKGILARVDGSQEIRPIVAEVLGILGWSDK

SEQ ID NO: 2531 - DNA, 693 bp, synthetic construct
  misc_feature 1..693: note = variant of adenylate kinase from Thermotoga neapolitana
  source 1..693: mol_type = other DNA
atgcaccatcatcaccatcacgggggctccggcatgggggcatatctggtgttattaggtccgccgggcgcgggaaaaggtacccaaggccgtattatttcggcaaagactggcatcccgcatattagcacgggcgatatcctgcgtgacatcgtcgctaagcaaaacgatgaagttgcctcgagcattaaagagtggatgctgaaaggtgaactcgttccagatgaaattggtaatgcggtagtaaaacgccgcctgaaggagaaagactgcgaaaaaggctttattttggatggtttcccgcgtaccgtggggcaagcggaatatctggatagttttcttgaaagccagggccgccagttgacagccgccgtgctgattgaggtccccgaagatgaagttgttgcacgtctgctgtctcgccgtgtttgtccgaaatgcgggcgtagttacaacatgatttttctgccaccaaaagaagacgagctgtgtgacgattgcggtgtcagcttagtacagcgtttagatgataaggaagaaacggtccgtcaccgcctgaaagtctaccgtgagaagacccagccggtcattgactattatagtaagaaaggtattctcgcacgcgtagatgggagccaagaaatccggcctatcgtggcagaagtcctggggattctgggttggagcgataag

SEQ ID NO: 2532 - protein, 231 aa, synthetic construct
  REGION 1..231: note = variant of adenylate kinase from Thermotoga neapolitana
MHHHHHHGGSGMGAYLVLLGPPGAGKGTQGRIISAKTGIPHISTGDILRDIVAKQNDEVASSIKEWMLKGELVPDEIGNAVVKRRLKEKDCEKGFILDGFPRTVGQAEYLDSFLESQGRQLTAAVLIEVPEDEVVARLLSRRVCPKCGRSYNMIFLPPKEDELCDDCGVSLVQRLDDKEETVRHRLKVYREKTQPVIDYYSKKGILARVDGSQEIRPIVAEVLGILGWSDK

SEQ ID NO: 2533 - DNA, 693 bp, synthetic construct
  misc_feature 1..693: note = variant of adenylate kinase from Thermotoga neapolitana
  source 1..693: mol_type = other DNA
atgcaccatcatcaccatcacgggggctccggcatgggggcatatctggtgttattaggtccgccgggcgcgggaaaaggtacccaaggccgtattatttcggcaaagactggcatcccgcatattagcacgggcgatatcctgcgtgacatcgtcgctaagcaaaacgatgaagtttggtcgagcattaaagagtggatgctgaaaggtgaactcgttccagatgaaattggtaatgcggtagtaaaacgccgcctgaaggagaaagactgcgaaaaaggctttattttggatggtttcccgcgtaccgtgcgccaagcggaatatctggatagttttcttgaaagccagggccgccagttgacagccgccgtgctgattgaggtccccgaagatgaagttgttgcacgtctgctgtctcgccgtgtttgtccgaaatgcgggcgtagttacaacatgatttttctgccaccaaaagaagacgagctgtgtgacgattgcggtgtcagcttagtacagcgtttagatgataaggaagaaacggtccgtcaccgcctgaaagtctaccgtgagaagacccagccggtcattgactattatagtaagaaaggtattctcgcacgcgtagatgggagccaagaaatccggcctatcgtggcagaagtcctggggattctgggttggagcgataag

SEQ ID NO: 2534 - protein, 231 aa, synthetic construct
  REGION 1..231: note = variant of adenylate kinase from Thermotoga neapolitana
MHHHHHHGGSGMGAYLVLLGPPGAGKGTQGRIISAKTGIPHISTGDILRDIVAKQNDEVWSSIKEWMLKGELVPDEIGNAVVKRRLKEKDCEKGFILDGFPRTVRQAEYLDSFLESQGRQLTAAVLIEVPEDEVVARLLSRRVCPKCGRSYNMIFLPPKEDELCDDCGVSLVQRLDDKEETVRHRLKVYREKTQPVIDYYSKKGILARVDGSQEIRPIVAEVLGILGWSDK

SEQ ID NO: 2535 - DNA, 693 bp, synthetic construct
  misc_feature 1..693: note = variant of adenylate kinase from Thermotoga neapolitana
  source 1..693: mol_type = other DNA
atgcaccatcatcaccatcacgggggctccggcatgggggcatatctggtgttattaggtccgccgggcgcgggaaaaggtacccaaggccgtattatttcggcaaagactggcatcccgcatattagcacgggcgatatcctgcgtgacatcgtcgctaagcaaaacgatgaagttgcctcgagcattaaagagtggatgctgaaaggtgaactcgttccagatgaaattggtaatgcggtagtaaaacgccgcctgaaggagaaagactgcgaaaaatattttattttggatggtttcccgcgtaccgtgcgccaagcggaatatctggatagttttcttgaaagccagggccgccagttgacagccgccgtgctgattgaggtccccgaagatgaagttgttgcacgtctgctgtctcgccgtgtttgtccgaaatgcgggcgtagttacaacatgatttttctgccaccaaaagaagacgagctgtgtgacgattgcggtgtcagcttagtacagcgtttagatgataaggaagaaacggtccgtcaccgcctgaaagtctaccgtgagaagacccagccggtcattgactattatagtaagaaaggtattctcgcacgcgtagatgggagccaagaaatccggcctatcgtggcagaagtcctggggattctgggttggagcgataag

SEQ ID NO: 2536 - protein, 231 aa, synthetic construct
  REGION 1..231: note = variant of adenylate kinase from Thermotoga neapolitana
MHHHHHHGGSGMGAYLVLLGPPGAGKGTQGRIISAKTGIPHISTGDILRDIVAKQNDEVASSIKEWMLKGELVPDEIGNAVVKRRLKEKDCEKYFILDGFPRTVRQAEYLDSFLESQGRQLTAAVLIEVPEDEVVARLLSRRVCPKCGRSYNMIFLPPKEDELCDDCGVSLVQRLDDKEETVRHRLKVYREKTQPVIDYYSKKGILARVDGSQEIRPIVAEVLGILGWSDK

SEQ ID NO: 2537 - DNA, 693 bp, synthetic construct
  misc_feature 1..693: note = variant of adenylate kinase from Thermotoga neapolitana
  source 1..693: mol_type = other DNA
atgcaccatcatcaccatcacgggggctccggcatgggggcatatctggtgttattaggtccgccgggcgcgggaaaaggtacccaaggccgtattatttcggcaaagactggcatcccgcatattagcacgggcgatatcctgcgtgacatcgtcgctaagcaaaacgatgaagttgcctcgagcattaaagagtggatgctgaaaggtgaactcgttccagatgaaattggtaatgcggtagtaaaacgccgcctgaaggagaaagactgcgaaaaaggctttattttggatggtttcccgcgtaccgtgcgccaagcggaatatctggatacgtttcttgaaagccagggccgccagttgacagccgccgtgctgattgaggtccccgaagatgaagttgttgcacgtctgctgtctcgccgtgtttgtccgaaatgcgggcgtagttacaacatgatttttctgccaccaaaagaagacgagctgtgtgacgattgcggtgtcagcttagtacagcgtttagatgataaggaagaaacggtccgtcaccgcctgaaagtctaccgtgagaagacccagccggtcattgactattatagtaagaaaggtattctcgcacgcgtagatgggagccaagaaatccggcctatcgtggcagaagtcctggggattctgggttggagcgataag

SEQ ID NO: 2538 - protein, 231 aa, synthetic construct
  REGION 1..231: note = variant of adenylate kinase from Thermotoga neapolitana
MHHHHHHGGSGMGAYLVLLGPPGAGKGTQGRIISAKTGIPHISTGDILRDIVAKQNDEVASSIKEWMLKGELVPDEIGNAVVKRRLKEKDCEKGFILDGFPRTVRQAEYLDTFLESQGRQLTAAVLIEVPEDEVVARLLSRRVCPKCGRSYNMIFLPPKEDELCDDCGVSLVQRLDDKEETVRHRLKVYREKTQPVIDYYSKKGILARVDGSQEIRPIVAEVLGILGWSDK

SEQ ID NO: 2539 - DNA, 693 bp, synthetic construct
  misc_feature 1..693: note = variant of adenylate kinase from Thermotoga neapolitana
  source 1..693: mol_type = other DNA
atgcaccatcatcaccatcacgggggctccggcatgggggcatatctggtgttattaggtccgccgggcgcgggaaaaggtacccaaggccgtattatttcggcaaagactggcatcccgcatattagcacgggcgatatcctgcgtgacatcgtcgctaagcaaaacgatgaagttgcctcgagcattaaagagtggatgctgaaaggtgaactcgttccagatgaaattggtaatgcggtagtaaaacgccgcctgtctgagaaagactgcgaaaaaggctttattttggatggtttcccgcgtaccgtgcgccaagcggaatatctggatagttttcttgaaagccagggccgccagttgacagccgccgtgctgattgaggtccccgaagatgaagttgttgcacgtctgctgtctcgccgtgtttgtccgaaatgcgggcgtagttacaacatgatttttctgccaccaaaagaagacgagctgtgtgacgattgcggtgtcagcttagtacagcgtttagatgataaggaagaaacggtccgtcaccgcctgaaagtctaccgtgagaagacccagccggtcattgactattatagtaagaaaggtattctcgcacgcgtagatgggagccaagaaatccggcctatcgtggcagaagtcctggggattctgggttggagcgataag

SEQ ID NO: 2540 - protein, 231 aa, synthetic construct
  REGION 1..231: note = variant of adenylate kinase from Thermotoga neapolitana
MHHHHHHGGSGMGAYLVLLGPPGAGKGTQGRIISAKTGIPHISTGDILRDIVAKQNDEVASSIKEWMLKGELVPDEIGNAVVKRRLSEKDCEKGFILDGFPRTVRQAEYLDSFLESQGRQLTAAVLIEVPEDEVVARLLSRRVCPKCGRSYNMIFLPPKEDELCDDCGVSLVQRLDDKEETVRHRLKVYREKTQPVIDYYSKKGILARVDGSQEIRPIVAEVLGILGWSDK

SEQ ID NO: 2541 - DNA, 693 bp, synthetic construct
  misc_feature 1..693: note = variant of adenylate kinase from Thermotoga neapolitana
  source 1..693: mol_type = other DNA
atgcaccatcatcaccatcacgggggctccggcatgggggcatatctggtgttattaggtccgccgggcgcgggaaaaggtacccaaggccgtattatttcggcaaagactggcatcccgcatattagcacgggcgatatcctgcgtgacatcgtcgctaagcaaaacgatgaagttgcctcgagcattaaagagtggatgctgaaaggtgaactcgttccagatgaaattggtaatgcggtagtaaaacgccgcctgaaggagaaagactgcgaaaaaggctttattttggatggtttcccgcgtaccgtgcgccaagcggaatatctggatagttttcttgaaagccagggccgccagttgacagccgccgtgctgattgaggtccccgaagatgaagttgttgcacgtctgctgtctcgccgtgtttgtccgaaatgcgggcgtagttacaacatgatttttctgccaccaaaagaagacgagctgtgtgacgattgcggtgtcagcttagtacagcgtttagatgataaggaagaaacggtccgtcaccgcctgggtgtctaccgtgagaagacccagccggtcattgactattatagtaagaaaggtattctcgcacgcgtagatgggagccaagaaatccggcctatcgtggcagaagtcctggggattctgggttggagcgataag

SEQ ID NO: 2542 - protein, 231 aa, synthetic construct
  REGION 1..231: note = variant of adenylate kinase from Thermotoga neapolitana
MHHHHHHGGSGMGAYLVLLGPPGAGKGTQGRIISAKTGIPHISTGDILRDIVAKQNDEVASSIKEWMLKGELVPDEIGNAVVKRRLKEKDCEKGFILDGFPRTVRQAEYLDSFLESQGRQLTAAVLIEVPEDEVVARLLSRRVCPKCGRSYNMIFLPPKEDELCDDCGVSLVQRLDDKEETVRHRLGVYREKTQPVIDYYSKKGILARVDGSQEIRPIVAEVLGILGWSDK

SEQ ID NO: 2543 - DNA, 693 bp, synthetic construct
  misc_feature 1..693: note = variant of adenylate kinase from Thermotoga neapolitana
  source 1..693: mol_type = other DNA
atgcaccatcatcaccatcacgggggctccggcatgggggcatatctggtgttattaggtccgccgggcgcgggaaaaggtacccaaggccgtattatttcggcaaagactggcatcccgcatattagcacgggcgatatcctgcgtgacatcgtcgctaagcaaaacgatgaagttgcctcgagcattaaagagtggatgctgaaaggtgaactcgttccagatgaaattggtaatgcggtagtaaaacgccgcctgaaggagaaagactgcgaaaaaggctttattttggatggtttcccgcgtaccgtgcgccaagcggaatatctggatagttttcttgaaagccagggccgcactttgacagccgccgtgctgattgaggtccccgaagatgaagttgttgcacgtctgctgtctcgccgtgtttgtccgaaatgcgggcgtagttacaacatgatttttctgccaccaaaagaagacgagctgtgtgacgattgcggtgtcagcttagtacagcgtttagatgataaggaagaaacggtccgtcaccgcctgaaagtctaccgtgagaagacccagccggtcattgactattatagtaagaaaggtattctcgcacgcgtagatgggagccaagaaatccggcctatcgtggcagaagtcctggggattctgggttggagcgataag

SEQ ID NO: 2544 - protein, 231 aa, synthetic construct
  REGION 1..231: note = variant of adenylate kinase from Thermotoga neapolitana
MHHHHHHGGSGMGAYLVLLGPPGAGKGTQGRIISAKTGIPHISTGDILRDIVAKQNDEVASSIKEWMLKGELVPDEIGNAVVKRRLKEKDCEKGFILDGFPRTVRQAEYLDSFLESQGRTLTAAVLIEVPEDEVVARLLSRRVCPKCGRSYNMIFLPPKEDELCDDCGVSLVQRLDDKEETVRHRLKVYREKTQPVIDYYSKKGILARVDGSQEIRPIVAEVLGILGWSDK

SEQ ID NO: 2545 - DNA, 693 bp, synthetic construct
  misc_feature 1..693: note = variant of adenylate kinase from Thermotoga neapolitana
  source 1..693: mol_type = other DNA
atgcaccatcatcaccatcacgggggctccggcatgggggcatatctggtgttattaggtccgccgggcgcgggaaaaggtacccaaggccgtattatttcggcaaagactggcatcccgcatattagcacgggcgatatcctgcgtgacatcgtcgctaagcaaaacgatgaagttgcctcgagcattaaagagtggatgctgaaaggtgaactcgttccagatgaaattggtaatgcggtagtaaaacgccgcctgattgagaaagactgcgaaaaaggctttattttggatggtttcccgcgtaccgtgcgccaagcggaatatctggatagttttcttgaaagccagggccgccagttgacagccgccgtgctgattgaggtccccgaagatgaagttgttgcacgtctgctgtctcgccgtgtttgtccgaaatgcgggcgtagttacaacatgatttttctgccaccaaaagaagacgagctgtgtgacgattgcggtgtcagcttagtacagcgtttagatgataaggaagaaacggtccgtcaccgcctgaaagtctaccgtgagaagacccagccggtcattgactattatagtaagaaaggtattctcgcacgcgtagatgggagccaagaaatccggcctatcgtggcagaagtcctggggattctgggttggagcgataag

SEQ ID NO: 2546 - protein, 231 aa, synthetic construct
  REGION 1..231: note = variant of adenylate kinase from Thermotoga neapolitana
MHHHHHHGGSGMGAYLVLLGPPGAGKGTQGRIISAKTGIPHISTGDILRDIVAKQNDEVASSIKEWMLKGELVPDEIGNAVVKRRLIEKDCEKGFILDGFPRTVRQAEYLDSFLESQGRQLTAAVLIEVPEDEVVARLLSRRVCPKCGRSYNMIFLPPKEDELCDDCGVSLVQRLDDKEETVRHRLKVYREKTQPVIDYYSKKGILARVDGSQEIRPIVAEVLGILGWSDK

SEQ ID NO: 2547 - DNA, 693 bp, synthetic construct
  misc_feature 1..693: note = variant of adenylate kinase from Thermotoga neapolitana
  source 1..693: mol_type = other DNA
atgcaccatcatcaccatcacgggggctccggcatgggggcatatctggtgttattaggtccgccgggcgcgggaaaaggtacccaaggccgtattatttcggcaaagactggcatcccgcatattagcacgggcgatatcctgcgtgacatcgtcgctaagcaaaacgatgaagttgcctcgagcattaaagagtggatgcggaaaggtgaactcgttccagatgaaattggtaatgcggtagtaaaacgccgcctgaaggagaaagactgcgaaaaaggctttattttggatggtttcccgcgtaccgtgcgccaagcggaatatctggatagttttcttgaaagccagggccgccagttgacagccgccgtgctgattgaggtccccgaagatgaagttgttgcacgtctgctgtctcgccgtgtttgtccgaaatgcgggcgtagttacaacatgatttttctgccaccaaaagaagacgagctgtgtgacgattgcggtgtcagcttagtacagcgtttagatgataaggaagaaacggtccgtcaccgcctgaaagtctaccgtgagaagacccagccggtcattgactattatagtaagaaaggtattctcgcacgcgtagatgggagccaagaaatccggcctatcgtggcagaagtcctggggattctgggttggagcgataag

SEQ ID NO: 2548 - protein, 231 aa, synthetic construct
  REGION 1..231: note = variant of adenylate kinase from Thermotoga neapolitana
MHHHHHHGGSGMGAYLVLLGPPGAGKGTQGRIISAKTGIPHISTGDILRDIVAKQNDEVASSIKEWMRKGELVPDEIGNAVVKRRLKEKDCEKGFILDGFPRTVRQAEYLDSFLESQGRQLTAAVLIEVPEDEVVARLLSRRVCPKCGRSYNMIFLPPKEDELCDDCGVSLVQRLDDKEETVRHRLKVYREKTQPVIDYYSKKGILARVDGSQEIRPIVAEVLGILGWSDK

SEQ ID NO: 2549 - DNA, 693 bp, synthetic construct
  misc_feature 1..693: note = variant of adenylate kinase from Thermotoga neapolitana
  source 1..693: mol_type = other DNA
atgcaccatcatcaccatcacgggggctccggcatgggggcatatctggtgttattaggtccgccgggcgcgggaaaaggtacccaaggccgtattatttcggcaaagtatggcatcccgcatattagcacgggcgatatcctgcgtgacatcgtcgctaagcaaaacgatgaagttgcctcgagcattaaagagtggatgctgaaaggtgaactcgttccagatgaaattggtaatgcggtagtaaaacgccgcctgaaggagaaagactgcgaaaaaggctttattttggatggtttcccgcgtaccgtgcgccaagcggaatatctggatagttttcttgaaagccagggccgccagttgacagccgccgtgctgattgaggtccccgaagatgaagttgttgcacgtctgctgtctcgccgtgtttgtccgaaatgcgggcgtagttacaacatgatttttctgccaccaaaagaagacgagctgtgtgacgattgcggtgtcagcttagtacagcgtttagatgataaggaagaaacggtccgtcaccgcctgaaagtctaccgtgagaagacccagccggtcattgactattatagtaagaaaggtattctcgcacgcgtagatgggagccaagaaatccggcctatcgtggcagaagtcctggggattctgggttggagcgataag

SEQ ID NO: 2550 - protein, 231 aa, synthetic construct
  REGION 1..231: note = variant of adenylate kinase from Thermotoga neapolitana
MHHHHHHGGSGMGAYLVLLGPPGAGKGTQGRIISAKYGIPHISTGDILRDIVAKQNDEVASSIKEWMLKGELVPDEIGNAVVKRRLKEKDCEKGFILDGFPRTVRQAEYLDSFLESQGRQLTAAVLIEVPEDEVVARLLSRRVCPKCGRSYNMIFLPPKEDELCDDCGVSLVQRLDDKEETVRHRLKVYREKTQPVIDYYSKKGILARVDGSQEIRPIVAEVLGILGWSDK

SEQ ID NO: 2551 - DNA, 693 bp, synthetic construct
  misc_feature 1..693: note = variant of adenylate kinase from Thermotoga neapolitana
  source 1..693: mol_type = other DNA
atgcaccatcatcaccatcacgggggctccggcatgggggcatatctggtgttattaggtccgccgggcgcgggaaaaggtacccaaggccgtattatttcggcaaagactggcatcccgcatattagcacgggcgatatcctgcgtgacatcgtcgctaagcaaaacgatgaagttgcctcgagcattaaagagtggatgctgaaaggtgaactcgttccagatgaaattggtaatgcggtagtaaaacgccgcctgaaggagaaagactgcgaaaaaggctttattttggatggtttcccgcgtaccgtgcgccaagcggaatatctggatagttttcttgaaagccagggccgccagttgacagccgccgtgctgattgaggtccccgaagatgaagttgttgcacgtctgctgtctcgccgtgtttgtccgaaatgcgggcgtagttacaacatgatttttctgccaccaaaagaagacgagctgtgtgacgattgcggtgtcagcttagtacgtcgtttagatgataaggaagaaacggtccgtcaccgcctgaaagtctaccgtgagaagacccagccggtcattgactattatagtaagaaaggtattctcgcacgcgtagatgggagccaagaaatccggcctatcgtggcagaagtcctggggattctgggttggagcgataag

SEQ ID NO: 2552 - protein, 231 aa, synthetic construct
  REGION 1..231: note = variant of adenylate kinase from Thermotoga neapolitana
MHHHHHHGGSGMGAYLVLLGPPGAGKGTQGRIISAKTGIPHISTGDILRDIVAKQNDEVASSIKEWMLKGELVPDEIGNAVVKRRLKEKDCEKGFILDGFPRTVRQAEYLDSFLESQGRQLTAAVLIEVPEDEVVARLLSRRVCPKCGRSYNMIFLPPKEDELCDDCGVSLVRRLDDKEETVRHRLKVYREKTQPVIDYYSKKGILARVDGSQEIRPIVAEVLGILGWSDK

SEQ ID NO: 2553 - DNA, 693 bp, synthetic construct
  misc_feature 1..693: note = variant of adenylate kinase from Thermotoga neapolitana
  source 1..693: mol_type = other DNA
atgcaccatcatcaccatcacgggggctccggcatgggggcatatctggtgttattaggtccgccgggcgcgggaaaaggtacccaaggccgtattatttcggcaaagactggcatcccgcatattagcacgggcgatatcctgcgtgacatcgtcgctaagcaaaacgatgaagttgcctcgagcattaaagagtggatgctgaaaggtgaactcgttccagatgaaattggtaatgcggtagtaaaacgccgcctgaaggagaaagactgcgaaaaaggctttattttggatggtttcccgcgtaccgtgatgcaagcggaatatctggatagttttcttgaaagccagggccgccagttgacagccgccgtgctgattgaggtccccgaagatgaagttgttgcacgtctgctgtctcgccgtgtttgtccgaaatgcgggcgtagttacaacatgatttttctgccaccaaaagaagacgagctgtgtgacgattgcggtgtcagcttagtacagcgtttagatgataaggaagaaacggtccgtcaccgcctgaaagtctaccgtgagaagacccagccggtcattgactattatagtaagaaaggtattctcgcacgcgtagatgggagccaagaaatccggcctatcgtggcagaagtcctggggattctgggttggagcgataag

SEQ ID NO: 2554 - protein, 231 aa, synthetic construct
  REGION 1..231: note = variant of adenylate kinase from Thermotoga neapolitana
MHHHHHHGGSGMGAYLVLLGPPGAGKGTQGRIISAKTGIPHISTGDILRDIVAKQNDEVASSIKEWMLKGELVPDEIGNAVVKRRLKEKDCEKGFILDGFPRTVMQAEYLDSFLESQGRQLTAAVLIEVPEDEVVARLLSRRVCPKCGRSYNMIFLPPKEDELCDDCGVSLVQRLDDKEETVRHRLKVYREKTQPVIDYYSKKGILARVDGSQEIRPIVAEVLGILGWSDK

SEQ ID NO: 2555 - DNA, 693 bp, synthetic construct
  misc_feature 1..693: note = variant of adenylate kinase from Thermotoga neapolitana
  source 1..693: mol_type = other DNA
atgcaccatcatcaccatcacgggggctccggcatgggggcatatctggtgttattaggtccgccgggcgcgggaaaaggtacccaaggccgtattatttcggcaaagactggcatcccgcatattagcacgggcgatatcctgcgtgacatcgtcgctaagcaaaacgatgaagttgcctcgagcattaaagagtggatgctgaaaggtgaactcgttccagatgaaattggtaatgcggtagtaaaacgccgcctgaaggagaaagactgcgaaaaaggctttattttggatggtttcccgcgtaccgtgcgccaagcggtttatctggatagttttcttgaaagccagggccgccagttgacagccgccgtgctgattgaggtccccgaagatgaagttgttgcacgtctgctgtctcgccgtgtttgtccgaaatgcgggcgtagttacaacatgatttttctgccaccaaaagaagacgagctgtgtgacgattgcggtgtcagcttagtacagcgtttagatgataaggaagaaacggtccgtcaccgcctgaaagtctaccgtgagaagacccagccggtcattgactattatagtaagaaaggtattctcgcacgcgtagatgggagccaagaaatccggcctatcgtggcagaagtcctggggattctgggttggagcgataag

SEQ ID NO: 2556 - protein, 231 aa, synthetic construct
  REGION 1..231: note = variant of adenylate kinase from Thermotoga neapolitana
MHHHHHHGGSGMGAYLVLLGPPGAGKGTQGRIISAKTGIPHISTGDILRDIVAKQNDEVASSIKEWMLKGELVPDEIGNAVVKRRLKEKDCEKGFILDGFPRTVRQAVYLDSFLESQGRQLTAAVLIEVPEDEVVARLLSRRVCPKCGRSYNMIFLPPKEDELCDDCGVSLVQRLDDKEETVRHRLKVYREKTQPVIDYYSKKGILARVDGSQEIRPIVAEVLGILGWSDK

SEQ ID NO: 2557 - DNA, 693 bp, synthetic construct
  misc_feature 1..693: note = variant of adenylate kinase from Thermotoga neapolitana
  source 1..693: mol_type = other DNA
atgcaccatcatcaccatcacgggggctccggcatgggggcatatctggtgttattaggtccgccgggcgcgggaaaaggtacccaaggccgtattatttcgcttaagactggcatcccgcatattagcacgggcgatatcctgcgtgacatcgtcgctaagcaaaacgatgaagttgcctcgagcattaaagagtggatgctgaaaggtgaactcgttccagatgaaattggtaatgcggtagtaaaacgccgcctgaaggagaaagactgcgaaaaaggctttattttggatggtttcccgcgtaccgtgcgccaagcggaatatctggatagttttcttgaaagccagggccgccagttgacagccgccgtgctgattgaggtccccgaagatgaagttgttgcacgtctgctgtctcgccgtgtttgtccgaaatgcgggcgtagttacaacatgatttttctgccaccaaaagaagacgagctgtgtgacgattgcggtgtcagcttagtacagcgtttagatgataaggaagaaacggtccgtcaccgcctgaaagtctaccgtgagaagacccagccggtcattgactattatagtaagaaaggtattctcgcacgcgtagatgggagccaagaaatccggcctatcgtggcagaagtcctggggattctgggttggagcgataag

SEQ ID NO: 2558 - protein, 231 aa, synthetic construct
  REGION 1..231: note = variant of adenylate kinase from Thermotoga neapolitana
MHHHHHHGGSGMGAYLVLLGPPGAGKGTQGRIISLKTGIPHISTGDILRDIVAKQNDEVASSIKEWMLKGELVPDEIGNAVVKRRLKEKDCEKGFILDGFPRTVRQAEYLDSFLESQGRQLTAAVLIEVPEDEVVARLLSRRVCPKCGRSYNMIFLPPKEDELCDDCGVSLVQRLDDKEETVRHRLKVYREKTQPVIDYYSKKGILARVDGSQEIRPIVAEVLGILGWSDK

SEQ ID NO: 2559 - DNA, 693 bp, synthetic construct
  misc_feature 1..693: note = variant of adenylate kinase from Thermotoga neapolitana
  source 1..693: mol_type = other DNA
atgcaccatcatcaccatcacgggggctccggcatgggggcatatctggtgttattaggtccgccgggcgcgggaaaaggtacccaaggccgtattatttcggcaaagactggcatcccgcatattagcacgggcgatatcctgcgtgacatcgtcgctaagcaaaacgatgaagttgcctcgagcattaaagagtggatgattaaaggtgaactcgttccagatgaaattggtaatgcggtagtaaaacgccgcctgaaggagaaagactgcgaaaaaggctttattttggatggtttcccgcgtaccgtgcgccaagcggaatatctggatagttttcttgaaagccagggccgccagttgacagccgccgtgctgattgaggtccccgaagatgaagttgttgcacgtctgctgtctcgccgtgtttgtccgaaatgcgggcgtagttacaacatgatttttctgccaccaaaagaagacgagctgtgtgacgattgcggtgtcagcttagtacagcgtttagatgataaggaagaaacggtccgtcaccgcctgaaagtctaccgtgagaagacccagccggtcattgactattatagtaagaaaggtattctcgcacgcgtagatgggagccaagaaatccggcctatcgtggcagaagtcctggggattctgggttggagcgataag

SEQ ID NO: 2560 - protein, 231 aa, synthetic construct
  REGION 1..231: note = variant of adenylate kinase from Thermotoga neapolitana
MHHHHHHGGSGMGAYLVLLGPPGAGKGTQGRIISAKTGIPHISTGDILRDIVAKQNDEVASSIKEWMIKGELVPDEIGNAVVKRRLKEKDCEKGFILDGFPRTVRQAEYLDSFLESQGRQLTAAVLIEVPEDEVVARLLSRRVCPKCGRSYNMIFLPPKEDELCDDCGVSLVQRLDDKEETVRHRLKVYREKTQPVIDYYSKKGILARVDGSQEIRPIVAEVLGILGWSDK

SEQ ID NO: 2561 - DNA, 693 bp, synthetic construct
  misc_feature 1..693: note = variant of adenylate kinase from Thermotoga neapolitana
  source 1..693: mol_type = other DNA
atgcaccatcatcaccatcacgggggctccggcatgggggcatatctggtgttattaggtccgccgggcgcgggaaaaggtacccaaggccgtattatttcggcaaagactggcatcccgcatattagcacgggcgatatcctgcgtgacatcgtcgctaagcaaaacgatgaagttgcctcgagcattaaagagtggatgctgaaaggtgaactcgttccagatgaaattggtaatgcggtagtaaaacgccgcctgaaggagaaagactgcgaaaaaggctttattttggatggtttcccgcgtaccgtgcgccaagcggaatatctggatagttttcttgaaagccagggccgccagttgacagccgccgtgctgattgaggtccccgaagatgaagttgttgcacgtctgctgtctcgccgtgtttgtccgaaatgcgggcgtagttacaacatgatttttctgccaccaaaagaagacgagctgtgtgacttttgcggtgtcagcttagtacagcgtttagatgataaggaagaaacggtccgtcaccgcctgaaagtctaccgtgagaagacccagccggtcattgactattatagtaagaaaggtattctcgcacgcgtagatgggagccaagaaatccggcctatcgtggcagaagtcctggggattctgggttggagcgataag

SEQ ID NO: 2562 - protein, 231 aa, synthetic construct
  REGION 1..231: note = variant of adenylate kinase from Thermotoga neapolitana
MHHHHHHGGSGMGAYLVLLGPPGAGKGTQGRIISAKTGIPHISTGDILRDIVAKQNDEVASSIKEWMLKGELVPDEIGNAVVKRRLKEKDCEKGFILDGFPRTVRQAEYLDSFLESQGRQLTAAVLIEVPEDEVVARLLSRRVCPKCGRSYNMIFLPPKEDELCDFCGVSLVQRLDDKEETVRHRLKVYREKTQPVIDYYSKKGILARVDGSQEIRPIVAEVLGILGWSDK

SEQ ID NO: 2563 - DNA, 693 bp, synthetic construct
  misc_feature 1..693: note = variant of adenylate kinase from Thermotoga neapolitana
  source 1..693: mol_type = other DNA
atgcaccatcatcaccatcacgggggctccggcatgggggcatatctggtgttattaggtccgccgggcgcgggaaaaggtacccaaggccgtattatttcgtttaagactggcatcccgcatattagcacgggcgatatcctgcgtgacatcgtcgctaagcaaaacgatgaagttgcctcgagcattaaagagtggatgctgaaaggtgaactcgttccagatgaaattggtaatgcggtagtaaaacgccgcctgaaggagaaagactgcgaaaaaggctttattttggatggtttcccgcgtaccgtgcgccaagcggaatatctggatagttttcttgaaagccagggccgccagttgacagccgccgtgctgattgaggtccccgaagatgaagttgttgcacgtctgctgtctcgccgtgtttgtccgaaatgcgggcgtagttacaacatgatttttctgccaccaaaagaagacgagctgtgtgacgattgcggtgtcagcttagtacagcgtttagatgataaggaagaaacggtccgtcaccgcctgaaagtctaccgtgagaagacccagccggtcattgactattatagtaagaaaggtattctcgcacgcgtagatgggagccaagaaatccggcctatcgtggcagaagtcctggggattctgggttggagcgataag

SEQ ID NO: 2564 - protein, 231 aa, synthetic construct
  REGION 1..231: note = variant of adenylate kinase from Thermotoga neapolitana
MHHHHHHGGSGMGAYLVLLGPPGAGKGTQGRIISFKTGIPHISTGDILRDIVAKQNDEVASSIKEWMLKGELVPDEIGNAVVKRRLKEKDCEKGFILDGFPRTVRQAEYLDSFLESQGRQLTAAVLIEVPEDEVVARLLSRRVCPKCGRSYNMIFLPPKEDELCDDCGVSLVQRLDDKEETVRHRLKVYREKTQPVIDYYSKKGILARVDGSQEIRPIVAEVLGILGWSDK

SEQ ID NO: 2565 - DNA, 693 bp, synthetic construct
  misc_feature 1..693: note = variant of adenylate kinase from Thermotoga neapolitana
  source 1..693: mol_type = other DNA
atgcaccatcatcaccatcacgggggctccggcatgggggcatatctggtgttattaggtccgccgggcgcgggaaaaggtacccaaggccgtattatttcggcaaagactggcatcccgcatattagcacgggcgatatcctgcgtgacatcgtcgctaagcaaaacgatgaagttgcctcgagcattaaagagtggatgctgaaaggtgaactcgttccagatgaaattggtaatgcggtagtaaaacgccgcctgaaggagaaagactgcgaaaaaggctttattttggatggtttcccgcgtaccgtgcgccaagcggaatatctggatagttttcttgaaagccagggccgctctttgacagccgccgtgctgattgaggtccccgaagatgaagttgttgcacgtctgctgtctcgccgtgtttgtccgaaatgcgggcgtagttacaacatgatttttctgccaccaaaagaagacgagctgtgtgacgattgcggtgtcagcttagtacagcgtttagatgataaggaagaaacggtccgtcaccgcctgaaagtctaccgtgagaagacccagccggtcattgactattatagtaagaaaggtattctcgcacgcgtagatgggagccaagaaatccggcctatcgtggcagaagtcctggggattctgggttggagcgataag

SEQ ID NO: 2566 - protein, 231 aa, synthetic construct
  REGION 1..231: note = variant of adenylate kinase from Thermotoga neapolitana
MHHHHHHGGSGMGAYLVLLGPPGAGKGTQGRIISAKTGIPHISTGDILRDIVAKQNDEVASSIKEWMLKGELVPDEIGNAVVKRRLKEKDCEKGFILDGFPRTVRQAEYLDSFLESQGRSLTAAVLIEVPEDEVVARLLSRRVCPKCGRSYNMIFLPPKEDELCDDCGVSLVQRLDDKEETVRHRLKVYREKTQPVIDYYSKKGILARVDGSQEIRPIVAEVLGILGWSDK

SEQ ID NO: 2567 - DNA, 693 bp, synthetic construct
  misc_feature 1..693: note = variant of adenylate kinase from Thermotoga neapolitana
  source 1..693: mol_type = other DNA
atgcaccatcatcaccatcacgggggctccggcatgggggcatatctggtgttattaggtccgccgggcgcgggaaaaggtacccaaggccgtattatttcggcaaagactggcatcccgcatattagcacgggcgatatcctgcgtgacatcgtcgctaagcaaaacgatgaagttgcctcgagcattaaagagtggatgctgaaaggtgaactcgttccagatgaaattggtaatgcggtagtaaaacgccgcctgaaggagaaagactgcgaaaaaggctttattttggatggtttcccgcgtaccgtgcgccaagcggaatatctggatagttttcttgaaagccagggccgccagttgacagccgccgtgctgattgaggtccccgaagatgaagttgttgcacgtctgctgtctcgccgtgtttgtccgaaatgcgggcgtagttacaacatgatttttctgccaccaaaagaagacgagctgtgtgacgattgcggtgtcagcttagtacagcgtttagatgataaggaagaaacggtccgttctcgcctgaaagtctaccgtgagaagacccagccggtcattgactattatagtaagaaaggtattctcgcacgcgtagatgggagccaagaaatccggcctatcgtggcagaagtcctggggattctgggttggagcgataag

SEQ ID NO: 2568 - protein, 231 aa, synthetic construct
  REGION 1..231: note = variant of adenylate kinase from Thermotoga neapolitana
MHHHHHHGGSGMGAYLVLLGPPGAGKGTQGRIISAKTGIPHISTGDILRDIVAKQNDEVASSIKEWMLKGELVPDEIGNAVVKRRLKEKDCEKGFILDGFPRTVRQAEYLDSFLESQGRQLTAAVLIEVPEDEVVARLLSRRVCPKCGRSYNMIFLPPKEDELCDDCGVSLVQRLDDKEETVRSRLKVYREKTQPVIDYYSKKGILARVDGSQEIRPIVAEVLGILGWSDK

SEQ ID NO: 2569 - DNA, 693 bp, synthetic construct
  misc_feature 1..693: note = variant of adenylate kinase from Thermotoga neapolitana
  source 1..693: mol_type = other DNA
atgcaccatcatcaccatcacgggggctccggcatgggggcatatctggtgttattaggtccgccgggcgcgggaaaaggtacccaaggccgtattatttcggcaaagactggcatcccgcatattagcacgggcgatatcctgcgtgacatcgtcgctaagcaaaacgatgaagttgcctcgagcattaaagagtggatgctgaaaggtgaactcgttccagatgaaattggtaatgcggtagtaaaacgccgcctgaaggagaaagactgcgaaaaaggctttattttggatggtttcccgcgtaccgtgcgccaagcggaatatctggatagttttcttgaaagccagggccgccagttgacagccgccgtgctgattgaggtccccgaagatgaagttgttgcacgtctgctgtctcgccgtgtttgtccgaaatgcgggcgtagttacaacatgatttttctgccaccaaaagaagacgagctgtgtgacgattgcggtgctagcttagtacagcgtttagatgataaggaagaaacggtccgtcaccgcctgaaagtctaccgtgagaagacccagccggtcattgactattatagtaagaaaggtattctcgcacgcgtagatgggagccaagaaatccggcctatcgtggcagaagtcctggggattctgggttggagcgataag

SEQ ID NO: 2570 - protein, 231 aa, synthetic construct
  REGION 1..231: note = variant of adenylate kinase from Thermotoga neapolitana
MHHHHHHGGSGMGAYLVLLGPPGAGKGTQGRIISAKTGIPHISTGDILRDIVAKQNDEVASSIKEWMLKGELVPDEIGNAVVKRRLKEKDCEKGFILDGFPRTVRQAEYLDSFLESQGRQLTAAVLIEVPEDEVVARLLSRRVCPKCGRSYNMIFLPPKEDELCDDCGASLVQRLDDKEETVRHRLKVYREKTQPVIDYYSKKGILARVDGSQEIRPIVAEVLGILGWSDK

SEQ ID NO: 2571 - DNA, 693 bp, synthetic construct
  misc_feature 1..693: note = variant of adenylate kinase from Thermotoga neapolitana
  source 1..693: mol_type = other DNA
atgcaccatcatcaccatcacgggggctccggcatgggggcatatctggtgttattaggtccgccgggcgcgggaaaaggtacccaaggccgtattatttcggcaaagactggcatcccgcatattagcacgggcgatatcctgcgtgacctggtcgctaagcaaaacgatgaagttgcctcgagcattaaagagtggatgctgaaaggtgaactcgttccagatgaaattggtaatgcggtagtaaaacgccgcctgaaggagaaagactgcgaaaaaggctttattttggatggtttcccgcgtaccgtgcgccaagcggaatatctggatagttttcttgaaagccagggccgccagttgacagccgccgtgctgattgaggtccccgaagatgaagttgttgcacgtctgctgtctcgccgtgtttgtccgaaatgcgggcgtagttacaacatgatttttctgccaccaaaagaagacgagctgtgtgacgattgcggtgtcagcttagtacagcgtttagatgataaggaagaaacggtccgtcaccgcctgaaagtctaccgtgagaagacccagccggtcattgactattatagtaagaaaggtattctcgcacgcgtagatgggagccaagaaatccggcctatcgtggcagaagtcctggggattctgggttggagcgataag

SEQ ID NO: 2572 - protein, 231 aa, synthetic construct
  REGION 1..231: note = variant of adenylate kinase from Thermotoga neapolitana
MHHHHHHGGSGMGAYLVLLGPPGAGKGTQGRIISAKTGIPHISTGDILRDLVAKQNDEVASSIKEWMLKGELVPDEIGNAVVKRRLKEKDCEKGFILDGFPRTVRQAEYLDSFLESQGRQLTAAVLIEVPEDEVVARLLSRRVCPKCGRSYNMIFLPPKEDELCDDCGVSLVQRLDDKEETVRHRLKVYREKTQPVIDYYSKKGILARVDGSQEIRPIVAEVLGILGWSDK

SEQ ID NO: 2573 - DNA, 693 bp, synthetic construct
  misc_feature 1..693: note = variant of adenylate kinase from Thermotoga neapolitana
  source 1..693: mol_type = other DNA
atgcaccatcatcaccatcacgggggctccggcatgggggcatatctggtgttattaggtccgccgggcgcgggaaaaggtacccaaggccgtattatttcggcaaagactggcatcccgcatattagcacgggcgatatcctgcgtgacatcgtcgctaagcaaaacgatgaagttgccgttagcattaaagagtggatgctgaaaggtgaactcgttccagatgaaattggtaatgcggtagtaaaacgccgcctgaaggagaaagactgcgaaaaaggctttattttggatggtttcccgcgtaccgtgcgccaagcggaatatctggatagttttcttgaaagccagggccgccagttgacagccgccgtgctgattgaggtccccgaagatgaagttgttgcacgtctgctgtctcgccgtgtttgtccgaaatgcgggcgtagttacaacatgatttttctgccaccaaaagaagacgagctgtgtgacgattgcggtgtcagcttagtacagcgtttagatgataaggaagaaacggtccgtcaccgcctgaaagtctaccgtgagaagacccagccggtcattgactattatagtaagaaaggtattctcgcacgcgtagatgggagccaagaaatccggcctatcgtggcagaagtcctggggattctgggttggagcgataag

SEQ ID NO: 2574 - protein, 231 aa, synthetic construct
  REGION 1..231: note = variant of adenylate kinase from Thermotoga neapolitana
MHHHHHHGGSGMGAYLVLLGPPGAGKGTQGRIISAKTGIPHISTGDILRDIVAKQNDEVAVSIKEWMLKGELVPDEIGNAVVKRRLKEKDCEKGFILDGFPRTVRQAEYLDSFLESQGRQLTAAVLIEVPEDEVVARLLSRRVCPKCGRSYNMIFLPPKEDELCDDCGVSLVQRLDDKEETVRHRLKVYREKTQPVIDYYSKKGILARVDGSQEIRPIVAEVLGILGWSDK

SEQ ID NO: 2575 - DNA, 693 bp, synthetic construct
  misc_feature 1..693: note = variant of adenylate kinase from Thermotoga neapolitana
  source 1..693: mol_type = other DNA
atgcaccatcatcaccatcacgggggctccggcatgggggcatatctggtgttattaggtccgccgggcgcgggaaaaggtacccaaggccgtattatttcggcaaagactggcatcccgcatattagcacgggcgatatcctgcgtgacatcgtcgctaagcaaaacgatgaagttgcctcgagcattaaagagtggatgctgaaaggtgaactcgttccagatgaaattggtaatgcggtagtaaaacgccgcctgaaggagaaagactgcgaaaaaggctttattttggatggtttcccgcgtaccgtgcgccaagcggaatatctggatagttttcttgaatttcagggccgccagttgacagccgccgtgctgattgaggtccccgaagatgaagttgttgcacgtctgctgtctcgccgtgtttgtccgaaatgcgggcgtagttacaacatgatttttctgccaccaaaagaagacgagctgtgtgacgattgcggtgtcagcttagtacagcgtttagatgataaggaagaaacggtccgtcaccgcctgaaagtctaccgtgagaagacccagccggtcattgactattatagtaagaaaggtattctcgcacgcgtagatgggagccaagaaatccggcctatcgtggcagaagtcctggggattctgggttggagcgataag

SEQ ID NO: 2576 - protein, 231 aa, synthetic construct
  REGION 1..231: note = variant of adenylate kinase from Thermotoga neapolitana
MHHHHHHGGSGMGAYLVLLGPPGAGKGTQGRIISAKTGIPHISTGDILRDIVAKQNDEVASSIKEWMLKGELVPDEIGNAVVKRRLKEKDCEKGFILDGFPRTVRQAEYLDSFLEFQGRQLTAAVLIEVPEDEVVARLLSRRVCPKCGRSYNMIFLPPKEDELCDDCGVSLVQRLDDKEETVRHRLKVYREKTQPVIDYYSKKGILARVDGSQEIRPIVAEVLGILGWSDK

SEQ ID NO: 2577 - DNA, 693 bp, synthetic construct
  misc_feature 1..693: note = variant of adenylate kinase from Thermotoga neapolitana
  source 1..693: mol_type = other DNA
atgcaccatcatcaccatcacgggggctccggcatgggggcatatctggtgttattaggtccgccgggcgcgggaaaaggtacccaaggccgtattatttcggcaaagactggcatcccgcatattagcacgggcgatatcctgcgtgacatcgtcgctaagcaaaacgatgaagttgcctcgagcattaaagattggatgctgaaaggtgaactcgttccagatgaaattggtaatgcggtagtaaaacgccgcctgaaggagaaagactgcgaaaaaggctttattttggatggtttcccgcgtaccgtgcgccaagcggaatatctggatagttttcttgaaagccagggccgccagttgacagccgccgtgctgattgaggtccccgaagatgaagttgttgcacgtctgctgtctcgccgtgtttgtccgaaatgcgggcgtagttacaacatgatttttctgccaccaaaagaagacgagctgtgtgacgattgcggtgtcagcttagtacagcgtttagatgataaggaagaaacggtccgtcaccgcctgaaagtctaccgtgagaagacccagccggtcattgactattatagtaagaaaggtattctcgcacgcgtagatgggagccaagaaatccggcctatcgtggcagaagtcctggggattctgggttggagcgataag

SEQ ID NO: 2578 - protein, 231 aa, synthetic construct
  REGION 1..231: note = variant of adenylate kinase from Thermotoga neapolitana
MHHHHHHGGSGMGAYLVLLGPPGAGKGTQGRIISAKTGIPHISTGDILRDIVAKQNDEVASSIKDWMLKGELVPDEIGNAVVKRRLKEKDCEKGFILDGFPRTVRQAEYLDSFLESQGRQLTAAVLIEVPEDEVVARLLSRRVCPKCGRSYNMIFLPPKEDELCDDCGVSLVQRLDDKEETVRHRLKVYREKTQPVIDYYSKKGILARVDGSQEIRPIVAEVLGILGWSDK

SEQ ID NO: 2579 - DNA, 693 bp, synthetic construct
  misc_feature 1..693: note = variant of adenylate kinase from Thermotoga neapolitana
  source 1..693: mol_type = other DNA
atgcaccatcatcaccatcacgggggctccggcatgggggcatatctggtgttattaggtccgccgggcgcgggaaaaggtacccaaggccgtattatttcggcaaagactggcatcccgcatattagcacgggcgatatcctgcgtgacatcgtcgctcatcaaaacgatgaagttgcctcgagcattaaagagtggatgctgaaaggtgaactcgttccagatgaaattggtaatgcggtagtaaaacgccgcctgaaggagaaagactgcgaaaaaggctttattttggatggtttcccgcgtaccgtgcgccaagcggaatatctggatagttttcttgaaagccagggccgccagttgacagccgccgtgctgattgaggtccccgaagatgaagttgttgcacgtctgctgtctcgccgtgtttgtccgaaatgcgggcgtagttacaacatgatttttctgccaccaaaagaagacgagctgtgtgacgattgcggtgtcagcttagtacagcgtttagatgataaggaagaaacggtccgtcaccgcctgaaagtctaccgtgagaagacccagccggtcattgactattatagtaagaaaggtattctcgcacgcgtagatgggagccaagaaatccggcctatcgtggcagaagtcctggggattctgggttggagcgataag

SEQ ID NO: 2580 - protein, 231 aa, synthetic construct
  REGION 1..231: note = variant of adenylate kinase from Thermotoga neapolitana
MHHHHHHGGSGMGAYLVLLGPPGAGKGTQGRIISAKTGIPHISTGDILRDIVAHQNDEVASSIKEWMLKGELVPDEIGNAVVKRRLKEKDCEKGFILDGFPRTVRQAEYLDSFLESQGRQLTAAVLIEVPEDEVVARLLSRRVCPKCGRSYNMIFLPPKEDELCDDCGVSLVQRLDDKEETVRHRLKVYREKTQPVIDYYSKKGILARVDGSQEIRPIVAEVLGILGWSDK

SEQ ID NO: 2581 - DNA, 693 bp, synthetic construct
  misc_feature 1..693: note = variant of adenylate kinase from Thermotoga neapolitana
  source 1..693: mol_type = other DNA
atgcaccatcatcaccatcacgggggctccggcatgggggcatatctggtgttattaggtccgccgggcgcgggaaaaggtacccaaggccgtattatttcggcaaagactggcatcccgcatattagcacgggcgatatcctgcgtgacatcgtcgctaagcaaaacgatgaagttgcctcgagcattaaagagtggatgctgaaaggtgaactcgttccagatgaaattggtaatgcggtagtaaaacgccgcctgaaggagaaagactgcgaaaaaggctttattttggatggtttcccgcgtaccgtgcgccaagcggaatatctggatagttttcttgaaagccagggccgccagttgacagccgccgtgctgattgaggtccccgaagatgaagttgttgcacgtctgctgtctcgccgtgtttgtccgaaatgcgggcgtagttacaacatgatttttctgccaccaaaagaagacgagctgtgtgacgattgcggtgtcagcttagtacagcgtttagatgataaggaagaaacggtccgtcaccgcctgaaagtctaccgtgagaagacccagccggtcattgactattatagtaagaaaggtattttggcacgcgtagatgggtgccaagaaatccggcctatcgtggcagaagtcctggggattctgggttggagcgataag

SEQ ID NO: 2582 - protein, 231 aa, synthetic construct
  REGION 1..231: note = variant of adenylate kinase from Thermotoga neapolitana
MHHHHHHGGSGMGAYLVLLGPPGAGKGTQGRIISAKTGIPHISTGDILRDIVAKQNDEVASSIKEWMLKGELVPDEIGNAVVKRRLKEKDCEKGFILDGFPRTVRQAEYLDSFLESQGRQLTAAVLIEVPEDEVVARLLSRRVCPKCGRSYNMIFLPPKEDELCDDCGVSLVQRLDDKEETVRHRLKVYREKTQPVIDYYSKKGILARVDGCQEIRPIVAEVLGILGWSDK

SEQ ID NO: 2583 - DNA, 693 bp, synthetic construct
  misc_feature 1..693: note = variant of adenylate kinase from Thermotoga neapolitana
  source 1..693: mol_type = other DNA
atgcaccatcatcaccatcacgggggctccggcatgggggcatatctggtgttattaggtccgccgggcgcgggaaaaggtacccaaggccgtattatttcggcaaagactggcatcccgcatattagcacgggcgatatcctgcgtgacatcgtcgctaagcaaaacgatgaagttgcctcgagcattaaagagtggatgctgaaaggtgaactcgttccagatgaaattggtaatgcggtagtaaaacgccgcctgaaggagaaagactgcgaaaaaggctttattttggatggtttcccgcgtaccgtgcgccaagcggaatatctggatagttttcttgaaagccagggccgccagttgacagccgccgtgctgattgaggtccccgaagatgaagttgttgcacgtctgctgtctcgccgtgtttgtccgaaatgcgggcgtagttacaacatgatttttctgccaccaaaagaagacgagctgtgtgacgattgcggtgtcagcttatctcagcgtttagatgataaggaagaaacggtccgtcaccgcctgaaagtctaccgtgagaagacccagccggtcattgactattatagtaagaaaggtattctcgcacgcgtagatgggagccaagaaatccggcctatcgtggcagaagtcctggggattctgggttggagcgataag

SEQ ID NO: 2584 - protein, 231 aa, synthetic construct
  REGION 1..231: note = variant of adenylate kinase from Thermotoga neapolitana
MHHHHHHGGSGMGAYLVLLGPPGAGKGTQGRIISAKTGIPHISTGDILRDIVAKQNDEVASSIKEWMLKGELVPDEIGNAVVKRRLKEKDCEKGFILDGFPRTVRQAEYLDSFLESQGRQLTAAVLIEVPEDEVVARLLSRRVCPKCGRSYNMIFLPPKEDELCDDCGVSLSQRLDDKEETVRHRLKVYREKTQPVIDYYSKKGILARVDGSQEIRPIVAEVLGILGWSDK

SEQ ID NO: 2585 - DNA, 693 bp, synthetic construct
  misc_feature 1..693: note = variant of adenylate kinase from Thermotoga neapolitana
  source 1..693: mol_type = other DNA
atgcaccatcatcaccatcacgggggctccggcatgggggcatatctggtgttattaggtccgccgggcgcgggaaaaggtacccaaggccgtattatttcggcaaagactggcatcccgcatattagcacgggcgatatcctgcgtgacatcgtcgctaagcttaacgatgaagttgcctcgagcattaaagagtggatgctgaaaggtgaactcgttccagatgaaattggtaatgcggtagtaaaacgccgcctgaaggagaaagactgcgaaaaaggctttattttggatggtttcccgcgtaccgtgcgccaagcggaatatctggatagttttcttgaaagccagggccgccagttgacagccgccgtgctgattgaggtccccgaagatgaagttgttgcacgtctgctgtctcgccgtgtttgtccgaaatgcgggcgtagttacaacatgatttttctgccaccaaaagaagacgagctgtgtgacgattgcggtgtcagcttagtacagcgtttagatgataaggaagaaacggtccgtcaccgcctgaaagtctaccgtgagaagacccagccggtcattgactattatagtaagaaaggtattctcgcacgcgtagatgggagccaagaaatccggcctatcgtggcagaagtcctggggattctgggttggagcgataag

SEQ ID NO: 2586 - protein, 231 aa, synthetic construct
  REGION 1..231: note = variant of adenylate kinase from Thermotoga neapolitana
MHHHHHHGGSGMGAYLVLLGPPGAGKGTQGRIISAKTGIPHISTGDILRDIVAKLNDEVASSIKEWMLKGELVPDEIGNAVVKRRLKEKDCEKGFILDGFPRTVRQAEYLDSFLESQGRQLTAAVLIEVPEDEVVARLLSRRVCPKCGRSYNMIFLPPKEDELCDDCGVSLVQRLDDKEETVRHRLKVYREKTQPVIDYYSKKGILARVDGSQEIRPIVAEVLGILGWSDK

SEQ ID NO: 2587 - DNA, 693 bp, synthetic construct
  misc_feature 1..693: note = variant of adenylate kinase from Thermotoga neapolitana
  source 1..693: mol_type = other DNA
atgcaccatcatcaccatcacgggggctccggcatgggggcatatctggtgttattaggtccgccgggcgcgggaaaaggtacccaaggccgtattatttcggcaaagactggcatcccgcatattagcacgggcgatatcctgcgtgacatcgtcgctaagcaaaacgatgaacttgcctcgagcattaaagagtggatgctgaaaggtgaactcgttccagatgaaattggtaatgcggtagtaaaacgccgcctgaaggagaaagactgcgaaaaaggctttattttggatggtttcccgcgtaccgtgcgccaagcggaatatctggatagttttcttgaaagccagggccgccagttgacagccgccgtgctgattgaggtccccgaagatgaagttgttgcacgtctgctgtctcgccgtgtttgtccgaaatgcgggcgtagttacaacatgatttttctgccaccaaaagaagacgagctgtgtgacgattgcggtgtcagcttagtacagcgtttagatgataaggaagaaacggtccgtcaccgcctgaaagtctaccgtgagaagacccagccggtcattgactattatagtaagaaaggtattctcgcacgcgtagatgggagccaagaaatccggcctatcgtggcagaagtcctggggattctgggttggagcgataag

SEQ ID NO: 2588 - protein, 231 aa, synthetic construct
  REGION 1..231: note = variant of adenylate kinase from Thermotoga neapolitana
MHHHHHHGGSGMGAYLVLLGPPGAGKGTQGRIISAKTGIPHISTGDILRDIVAKQNDELASSIKEWMLKGELVPDEIGNAVVKRRLKEKDCEKGFILDGFPRTVRQAEYLDSFLESQGRQLTAAVLIEVPEDEVVARLLSRRVCPKCGRSYNMIFLPPKEDELCDDCGVSLVQRLDDKEETVRHRLKVYREKTQPVIDYYSKKGILARVDGSQEIRPIVAEVLGILGWSDK

SEQ ID NO: 2589 - DNA, 693 bp, synthetic construct
  misc_feature 1..693: note = variant of adenylate kinase from Thermotoga neapolitana
  source 1..693: mol_type = other DNA
atgcaccatcatcaccatcacgggggctccggcatgggggcatatctggtgttattaggtccgccgggcgcgggaaaaggtacccaaggccgtattatttcggcaaagactggcatcccgcatattagcacgggcgatatcctgcgtgacatcgtcgctaagcaaaacgatgaagtttgttcgagcattaaagagtggatgctgaaaggtgaactcgttccagatgaaattggtaatgcggtagtaaaacgccgcctgaaggagaaagactgcgaaaaaggctttattttggatggtttcccgcgtaccgtgcgccaagcggaatatctggatagttttcttgaaagccagggccgccagttgacagccgccgtgctgattgaggtccccgaagatgaagttgttgcacgtctgctgtctcgccgtgtttgtccgaaatgcgggcgtagttacaacatgatttttctgccaccaaaagaagacgagctgtgtgacgattgcggtgtcagcttagtacagcgtttagatgataaggaagaaacggtccgtcaccgcctgaaagtctaccgtgagaagacccagccggtcattgactattatagtaagaaaggtattctcgcacgcgtagatgggagccaagaaatccggcctatcgtggcagaagtcctggggattctgggttggagcgataag

SEQ ID NO: 2590 - protein, 231 aa, synthetic construct
  REGION 1..231: note = variant of adenylate kinase from Thermotoga neapolitana
MHHHHHHGGSGMGAYLVLLGPPGAGKGTQGRIISAKTGIPHISTGDILRDIVAKQNDEVCSSIKEWMLKGELVPDEIGNAVVKRRLKEKDCEKGFILDGFPRTVRQAEYLDSFLESQGRQLTAAVLIEVPEDEVVARLLSRRVCPKCGRSYNMIFLPPKEDELCDDCGVSLVQRLDDKEETVRHRLKVYREKTQPVIDYYSKKGILARVDGSQEIRPIVAEVLGILGWSDK

SEQ ID NO: 2591 - DNA, 693 bp, synthetic construct
  misc_feature 1..693: note = variant of adenylate kinase from Thermotoga neapolitana
  source 1..693: mol_type = other DNA
atgcaccatcatcaccatcacgggggctccggcatgggggcatatctggtgttattaggtccgccgggcgcgggaaaaggtacccaaggccgtattatttcggcaaagactggcatcccgcatattagcacgggcgatatcctgcgtgacatcgtcgctaagcaaaacgatgaagttgcctcgagcattaaagagtggatgctgaaaggtgaactcgttccagatgaaattggtaatgcggtagtaaaacgccgcctgaaggagaaagactgcgaaaaaggctttattttggatggtttcccgcgtaccgtgcgccaagcggaatatctggatagttttcttgaaagccagggccgccagttgacagccgccgtgctgattgaggtccccgaagatgaagttgttgcacgtctgctgtctcgccgtgtttgtccgaaatgcgggcgtagttacaacatgatttttctgccaccaaaagaagacgagctgtgtgacgattgcggtgtcagcttagtacagcgtttagatgataaggaagaaacggtccgtcaccgcctgaaagtctaccgtgagaagacccagccggtcattgactattatagtaagaaaggtattctcgcacgcgtagatgggagccaagaaatccggcctatcgtggcagaagtcctggggattctgggttttagcgataag

SEQ ID NO: 2592 - protein, 231 aa, synthetic construct
  REGION 1..231: note = variant of adenylate kinase from Thermotoga neapolitana
MHHHHHHGGSGMGAYLVLLGPPGAGKGTQGRIISAKTGIPHISTGDILRDIVAKQNDEVASSIKEWMLKGELVPDEIGNAVVKRRLKEKDCEKGFILDGFPRTVRQAEYLDSFLESQGRQLTAAVLIEVPEDEVVARLLSRRVCPKCGRSYNMIFLPPKEDELCDDCGVSLVQRLDDKEETVRHRLKVYREKTQPVIDYYSKKGILARVDGSQEIRPIVAEVLGILGFSDK

SEQ ID NO: 2593 - DNA, 693 bp, synthetic construct
  misc_feature 1..693: note = variant of adenylate kinase from Thermotoga neapolitana
  source 1..693: mol_type = other DNA
atgcaccatcatcaccatcacgggggctccggcatgggggcatatctggtgttattaggtccgccgggcgcgggaaaaggtacccaaggccgtattatttcggcaaagactggcatcccgcatattagcacgggcgatatcctgcgtgacatcgtcgctaagcaacaggatgaagttgcctcgagcattaaagagtggatgctgaaaggtgaactcgttccagatgaaattggtaatgcggtagtaaaacgccgcctgaaggagaaagactgcgaaaaaggctttattttggatggtttcccgcgtaccgtgcgccaagcggaatatctggatagttttcttgaaagccagggccgccagttgacagccgccgtgctgattgaggtccccgaagatgaagttgttgcacgtctgctgtctcgccgtgtttgtccgaaatgcgggcgtagttacaacatgatttttctgccaccaaaagaagacgagctgtgtgacgattgcggtgtcagcttagtacagcgtttagatgataaggaagaaacggtccgtcaccgcctgaaagtctaccgtgagaagacccagccggtcattgactattatagtaagaaaggtattctcgcacgcgtagatgggagccaagaaatccggcctatcgtggcagaagtcctggggattctgggttggagcgataag

SEQ ID NO: 2594 - protein, 231 aa, synthetic construct
  REGION 1..231: note = variant of adenylate kinase from Thermotoga neapolitana
MHHHHHHGGSGMGAYLVLLGPPGAGKGTQGRIISAKTGIPHISTGDILRDIVAKQQDEVASSIKEWMLKGELVPDEIGNAVVKRRLKEKDCEKGFILDGFPRTVRQAEYLDSFLESQGRQLTAAVLIEVPEDEVVARLLSRRVCPKCGRSYNMIFLPPKEDELCDDCGVSLVQRLDDKEETVRHRLKVYREKTQPVIDYYSKKGILARVDGSQEIRPIVAEVLGILGWSDK

SEQ ID NO: 2595 - DNA, 693 bp, synthetic construct
  misc_feature 1..693: note = variant of adenylate kinase from Thermotoga neapolitana
  source 1..693: mol_type = other DNA
atgcaccatcatcaccatcacgggggctccggcatgggggcatatctggtgttattaggtccgccgggcgcgggaaaaggtacccaaggccgtattatttcggcaaagactggcatcccgcatattagcacgggcgatatcctgcgtgacatcgtcgctaagcaaaacgatgaagttgcctcgagcattaaagaatggatgctgaaaggtgaactcgttccagatgaaattggtaatcctgtagtaaaacgccgcctgaaggagaaagactgcgaaaaaggctttattttggatggtttcccgcgtaccgtgcgccaagcggaatatctggatagttttcttgaaagccagggccgccagttgacagccgccgtgctgattgaggtccccgaagatgaagttgtttatcgtctgctgtctcgccgtgtttgtccgaaatgcgggcgtagttacaacatgatttttctgccaccaaaagaagacgagctgtgtgacgattgcggtgtcagcttagtacagcgtttagatgataaggaagaaacggtccgtcaccgcctgaaagtctaccgtgagaagacccagccggtcattgactattatagtaagaaaggtattctcgcacgcgtagatgggagccaagaaatccggcctatcgtggcagaagtcctggggattctgggtgtgagcgataag

SEQ ID NO: 2596 - protein, 231 aa, synthetic construct
  REGION 1..231: note = variant of adenylate kinase from Thermotoga neapolitana
MHHHHHHGGSGMGAYLVLLGPPGAGKGTQGRIISAKTGIPHISTGDILRDIVAKQNDEVASSIKEWMLKGELVPDEIGNPVVKRRLKEKDCEKGFILDGFPRTVRQAEYLDSFLESQGRQLTAAVLIEVPEDEVVYRLLSRRVCPKCGRSYNMIFLPPKEDELCDDCGVSLVQRLDDKEETVRHRLKVYREKTQPVIDYYSKKGILARVDGSQEIRPIVAEVLGILGVSDK

SEQ ID NO: 2597 - DNA, 693 bp, synthetic construct
  misc_feature 1..693: note = variant of adenylate kinase from Thermotoga neapolitana
  source 1..693: mol_type = other DNA
atgcaccatcatcaccatcacgggggctccggcatgggggcatatctggtgttattaggtccgccgggcgcgggaaaaggtacccaaggccgtattatttcggcaaagactggcatcccgcatattagcacgggcgatatcctgcgtgatatcgtcgctaagcaaaacgatgaagttgcctcgagcattaaagagtggatgctgaaaggtgaactcgttccagatgaaattggtaatcctgtactgaaacgccgcctgaaggagaaagactgcgaaaaaggctttattttggatggtttcccgcgtaccgtgcgccaagcggaatatctggatagttttcttgaaagccagggccgccagttgacagccgccgtgctgattgaggtccccgaagatgaagttgttgcacgtctgctgtctcgcatggtttgtccgaaatgcgggcgtagttacaacatgatttttctgccaccaaaagaagacgagctgtgtgacgattgcggtgtcagcttagtaacccgtttagatgataaggaagaaacggtccgtacgcgcctgaaagtctaccgtgagaagacccagccggtcattgactattatagtaagaaaggtattctcgcacgcgtagatgggagccaagaaatcatgcctatcgtggcagaagtcctggggattctgggttggagcgataag

SEQ ID NO: 2598 - protein, 231 aa, synthetic construct
  REGION 1..231: note = variant of adenylate kinase from Thermotoga neapolitana
MHHHHHHGGSGMGAYLVLLGPPGAGKGTQGRIISAKTGIPHISTGDILRDIVAKQNDEVASSIKEWMLKGELVPDEIGNPVLKRRLKEKDCEKGFILDGFPRTVRQAEYLDSFLESQGRQLTAAVLIEVPEDEVVARLLSRMVCPKCGRSYNMIFLPPKEDELCDDCGVSLVTRLDDKEETVRTRLKVYREKTQPVIDYYSKKGILARVDGSQEIMPIVAEVLGILGWSDK

SEQ ID NO: 2599 - DNA, 693 bp, synthetic construct
  misc_feature 1..693: note = variant of adenylate kinase from Thermotoga neapolitana
  source 1..693: mol_type = other DNA
atgcaccatcatcaccatcacgggggctccggcatgggggcatatctggtgttattaggtccgccgggcgcgggaaaaggtacccaaggccgtattatttcggcaaagactggcatcccgcatattagcacgggcgatatcctgcgtgatatcgtcgctaagcaaaacgatgaagttgcctcgagcattaaagagtggatgctgaaaggtgaactcgttccagatgaaattggtaatcctgtagtgaaacgccgcctgaaggagaaagactgcgaaaaaggctttattttggatggtttcccgcgtaccgtgcgccaagcggaatatctggatagttttcttgaaagccagggccgccagttgacagccgccgtgctgattgaggtccccgaagatgaagttgttgcacgtctgctgtctcgccgggtttgtccgaaatgcgggcgtagttacaacatgatttttctgccaccaaaagaagacgagctgtgtgacgattgcggtgtcagcttagtacagcgtttagatgataaggaagaaacggtccgtacgcgcctgaaagtctaccgtgagaagacccagccggtcattgactattatagtaagaaaggtattctcgcacgcgtagatgggagccaagaaatcatgcctatcgtggcagaagtcctggggattctgggttggagcgataag

SEQ ID NO: 2600 - protein, 231 aa, synthetic construct
  REGION 1..231: note = variant of adenylate kinase from Thermotoga neapolitana
MHHHHHHGGSGMGAYLVLLGPPGAGKGTQGRIISAKTGIPHISTGDILRDIVAKQNDEVASSIKEWMLKGELVPDEIGNPVVKRRLKEKDCEKGFILDGFPRTVRQAEYLDSFLESQGRQLTAAVLIEVPEDEVVARLLSRRVCPKCGRSYNMIFLPPKEDELCDDCGVSLVQRLDDKEETVRTRLKVYREKTQPVIDYYSKKGILARVDGSQEIMPIVAEVLGILGWSDK

SEQ ID NO: 2601 - DNA, 693 bp, synthetic construct
  misc_feature 1..693: note = variant of adenylate kinase from Thermotoga neapolitana
  source 1..693: mol_type = other DNA
atgcaccatcatcaccatcacgggggctccggcatgggggcatatctggtgttattaggtccgccgggcgcgggaaaaggtacccaaggccgtattatttcggcaaagactggcatcccgcatattagcacgggcgatatcctgcgtcagatcgtcgctaagcaaaacgatgaagttgcctcgagcattaaagagtggatgctgaaaggtgaactcgttccagatgaaattggtaatcctgtagtaaaacgccgcctgaaggagaaagactgcgaaaaaggctttattttggatggtttcccgcgtaccgtgcgccaagcggaatatctggatagttttcttgaaagccagggccgccagttgacagccgccgtgctgattgaggtccccgaagatgaagttgttgcacgtctgctgtctcgccgtgtttgtccgaaatgcgggcgtagttacaacatgatttttctgccaccaaaagaagacgagctgtgtgacgattgcggtgtcagcttagtacagcgtttagatgataaggaagaaacggtccgtatgcgcctgaaagtctaccgtgagaagacccagccggtcattgactattatagtaagaaaggtattctcgcacgcgtagatgggagccaagaaatcatgcctatcgtggcagaagtcctggggattctgggttggagcgataag

SEQ ID NO: 2602 - protein, 231 aa, synthetic construct
  REGION 1..231: note = variant of adenylate kinase from Thermotoga neapolitana
MHHHHHHGGSGMGAYLVLLGPPGAGKGTQGRIISAKTGIPHISTGDILRQIVAKQNDEVASSIKEWMLKGELVPDEIGNPVVKRRLKEKDCEKGFILDGFPRTVRQAEYLDSFLESQGRQLTAAVLIEVPEDEVVARLLSRRVCPKCGRSYNMIFLPPKEDELCDDCGVSLVQRLDDKEETVRMRLKVYREKTQPVIDYYSKKGILARVDGSQEIMPIVAEVLGILGWSDK

SEQ ID NO: 2603 - DNA, 693 bp, synthetic construct
  misc_feature 1..693: note = variant of adenylate kinase from Thermotoga neapolitana
  source 1..693: mol_type = other DNA
atgcaccatcatcaccatcacgggggctccggcatgggggcatatctggtgttattaggtccgccgggcgcgggaaaaggtacccaaggccgtattatttcggcaaagactggcatcccgcatattagcacgggcgatatcctgcgtgatatcgtcgctaagcaaaacgatgaagttgcctcgagcattaaagagtggatgctgaaaggtgaactcgttccagatgaaattggtaatcctgtagtgaaacgccgcctgaaggagaaagactgcgaaaaaggctttattttggatggtttcccgcgtaccgtgcgccaagcggaatatctggatagttttcttgaaagccagggccgccagttgacagccgccgtgctgcttgaggtccccgaagatgaagttgttgcacgtctgctgtctcgccgggtttgtccgaaatgcgggcgtagttacaacatgatttttctgccaccaaaagaagacgagctgtgtgacgattgcggtgtcagcttagtacggcgtttagatgataaggaagaaacggtccgtatgcgcctgaaagtctaccgtgagaagacccagccggtcattgactattatagtaagaaaggtattctcgcacgcgtagatgggagccaagaaatccggcctatcgtggcagaagtcctggggattctgggttggagcgataag

SEQ ID NO: 2604 - protein, 231 aa, synthetic construct
  REGION 1..231: note = variant of adenylate kinase from Thermotoga neapolitana
MHHHHHHGGSGMGAYLVLLGPPGAGKGTQGRIISAKTGIPHISTGDILRDIVAKQNDEVASSIKEWMLKGELVPDEIGNPVVKRRLKEKDCEKGFILDGFPRTVRQAEYLDSFLESQGRQLTAAVLLEVPEDEVVARLLSRRVCPKCGRSYNMIFLPPKEDELCDDCGVSLVRRLDDKEETVRMRLKVYREKTQPVIDYYSKKGILARVDGSQEIRPIVAEVLGILGWSDK

SEQ ID NO: 2605 - DNA, 693 bp, synthetic construct
  misc_feature 1..693: note = variant of adenylate kinase from Thermotoga neapolitana
  source 1..693: mol_type = other DNA
atgcaccatcatcaccatcacgggggctccggcatgggggcatatctggtgttattaggtccgccgggcgcgggaaaaggtacccaaggccgtattatttcggcaaagactggcatcccgcatattagcacgggcgatatcctgcgtgacatcgtcgctaagcaaaacgatgaagttgcctcgagcattaaagaatggatgctgaaaggtgaactcgttccagatgaaattggtaatcctgtagtaaaacgccgcctgaaggagaaagactgcgaaaaaggctttattttggatggtttcccgcgtaccgtgaaacaagcggaatatctggatagttttcttgaaagccagggccgccagttgacagccgccgtgctgattgaggtccccgaagatgaagttgttgtgcgtctgctgtctcgccgtgtttgtccgaaatgcgggcgtagttacaacatgatttttctgccaccaaaagaagacgagctgtgtgacgattgcggtgtccgcttagtacagcgttttgatgataaggaagaaacggtccgtcaccgcctgaaagtctaccgtgagaagacccagccggtcattgactattatagtaagaaaggtattctcgcacgcgtagatgggagccaagaaatccggcctatcgtggcagaagtcctggggattctgggtaccagcgataag

SEQ ID NO: 2606 - protein, 231 aa, synthetic construct
  REGION 1..231: note = variant of adenylate kinase from Thermotoga neapolitana
MHHHHHHGGSGMGAYLVLLGPPGAGKGTQGRIISAKTGIPHISTGDILRDIVAKQNDEVASSIKEWMLKGELVPDEIGNPVVKRRLKEKDCEKGFILDGFPRTVKQAEYLDSFLESQGRQLTAAVLIEVPEDEVVVRLLSRRVCPKCGRSYNMIFLPPKEDELCDDCGVRLVQRFDDKEETVRHRLKVYREKTQPVIDYYSKKGILARVDGSQEIRPIVAEVLGILGTSDK

SEQ ID NO: 2607 - DNA, 693 bp, synthetic construct
  misc_feature 1..693: note = variant of adenylate kinase from Thermotoga neapolitana
  source 1..693: mol_type = other DNA
atgcaccatcatcaccatcacgggggctccggcatgggggcatatctggtgttattaggtccgccgggcgcgggaaaaggtacccaaggccgtattatttcggcaaagactggcatcccgcatattagcacgggcgatatcctgcgtgacatcgtcgctaagcaaaacgatgaagttgcctcgagcattaaagaatggatgctgaaaggtgaactcgttccagatgaaattggtaatcctgtagtaaaacgccgcctgaaggagaaagactgcgaaaaaggctttattttggatggtttcccgcgtaccgtgaaacaagcggaatatctggatagttttcttgaaagccagggccgccagttgacagccgccgtgctgattgaggtccccgaagatgaagttgttgcacgtctgctgtctcgccgtgtttgtccgaaatgcgggcgtagttacaacatgatttttctgccaccaaaagaagacgagctgtgtgacgattgcggtgtcagcttagtacagcgttttgatgataaggaagaaacggtccgtcaccgcctgaaagtctaccgtgagaagacccagccggtcattgactattatagtaagaaaggtattctcgcacgcgtagatgggagccaagaaatccggcctatcgtggcagaagtcctggggattctgggttggagcgataag

SEQ ID NO: 2608 - protein, 231 aa, synthetic construct
  REGION 1..231: note = variant of adenylate kinase from Thermotoga neapolitana
MHHHHHHGGSGMGAYLVLLGPPGAGKGTQGRIISAKTGIPHISTGDILRDIVAKQNDEVASSIKEWMLKGELVPDEIGNPVVKRRLKEKDCEKGFILDGFPRTVKQAEYLDSFLESQGRQLTAAVLIEVPEDEVVARLLSRRVCPKCGRSYNMIFLPPKEDELCDDCGVSLVQRFDDKEETVRHRLKVYREKTQPVIDYYSKKGILARVDGSQEIRPIVAEVLGILGWSDK

SEQ ID NO: 2609 - DNA, 693 bp, synthetic construct
  misc_feature 1..693: note = variant of adenylate kinase from Thermotoga neapolitana
  source 1..693: mol_type = other DNA
atgcaccatcatcaccatcacgggggctccggcatgggggcatatctggtgttattaggtccgccgggcgcgggaaaaggtacccaaggccgtattatttcggcaaagactggcatcccgcatattagcacgggcgatatcctgcgtgatatcgtcgctaagcaaaacgatgaagttgcctcgagcattaaagagtggatgctgaaaggtgaactcgttccagatgaaattggtaatcctgtagtgaaacgccgcctgaaggagaaagactgcgaaaaaggctttattttggatggtttcccgcgtaccgtgcgccaagcggaatatctggatagttttcttgaaagccagggccgccagttgacagccgccgtgctgcttgaggtccccgaagatgaagttgttgcacgtctgctgtctcgccgggtttgtccgaaatgcgggcgtagttacaacatgatttttctgccaccaaaagaagacgagctgtgtgacgattgcggtgtcagcttagtaacccgtttagatgataaggaagaaacggtccgtatgcgcctgaaagtctaccgtgagaagacccagccggtcattgactattatagtaagaaaggtattctcgcacgcgtagatgggagccaagaaatccgccctatcgtggcagaagtcctggggattctgggttggagcgataag

SEQ ID NO: 2610 - protein, 231 aa, synthetic construct
  REGION 1..231: note = variant of adenylate kinase from Thermotoga neapolitana
MHHHHHHGGSGMGAYLVLLGPPGAGKGTQGRIISAKTGIPHISTGDILRDIVAKQNDEVASSIKEWMLKGELVPDEIGNPVVKRRLKEKDCEKGFILDGFPRTVRQAEYLDSFLESQGRQLTAAVLLEVPEDEVVARLLSRRVCPKCGRSYNMIFLPPKEDELCDDCGVSLVTRLDDKEETVRMRLKVYREKTQPVIDYYSKKGILARVDGSQEIRPIVAEVLGILGWSDK

SEQ ID NO: 2611 - DNA, 693 bp, synthetic construct
  misc_feature 1..693: note = variant of adenylate kinase from Thermotoga neapolitana
  source 1..693: mol_type = other DNA
atgcaccatcatcaccatcacgggggctccggcatgggggcatatctggtgttattaggtccgccgggcgcgggaaaaggtacccaaggccgtattatttcggcaaagactggcatcccgcatattagcacgggcgatatcctgcgtcagatcgtcgctaagcaaaacgatgaagttgcctcgagcattaaagagtggatgctgaaaggtgaactcgttccagatgaaattggtaatcctgtagtgaaacgccgcctgaaggagaaagactgcgaaaaaggctttattttggatggtttcccgcgtaccgtgcgccaagcggaatatctggatagttttcttgaaagccagggccgccagttgacagccgccgtgctgattgaggtccccgaagatgaagttgttgcacgtctgctgtctcgccgggtttgtccgaaatgcgggcgtagttacaacatgatttttctgccaccaaaagaagacgagctgtgtgacgattgcggtgtcagcttagtacagcgtttagatgataaggaagaaacggtccgtacgcgcctgaaagtctaccgtgagaagacccagccggtcattgactattatagtaagaaaggtattctcgcacgcgtagatgggagccaagaaatccggcctatcgtggcagaagtcctggggattctgggttggagcgataag

SEQ ID NO: 2612 - protein, 231 aa, synthetic construct
  REGION 1..231: note = variant of adenylate kinase from Thermotoga neapolitana
MHHHHHHGGSGMGAYLVLLGPPGAGKGTQGRIISAKTGIPHISTGDILRQIVAKQNDEVASSIKEWMLKGELVPDEIGNPVVKRRLKEKDCEKGFILDGFPRTVRQAEYLDSFLESQGRQLTAAVLIEVPEDEVVARLLSRRVCPKCGRSYNMIFLPPKEDELCDDCGVSLVQRLDDKEETVRTRLKVYREKTQPVIDYYSKKGILARVDGSQEIRPIVAEVLGILGWSDK

SEQ ID NO: 2613 - DNA, 693 bp, synthetic construct
  misc_feature 1..693: note = variant of adenylate kinase from Thermotoga neapolitana
  source 1..693: mol_type = other DNA
atgcaccatcatcaccatcacgggggctccggcatgggggcatatctggtgttattaggtccgccgggcgcgggaaaaggtacccaaggccgtattatttcggcaaagactggcatcccgcatattagcacgggcgatatcctgcgtgacatcgtcgctaagcaaaacgatgaagttgcctcgagcattaaagagtggatgctgaaaggtgaactcgttccagatgaaattggtaatcctgtagtaaaacgccgcctgaaggagaaagactgcgaaaaaggctttattttggatggtttcccgcgtaccgtgaaacaagcggaatatctggatagttttcttgaaagccagggccgccagttgacagccgccgtgctgattgaggtccccgaagatgaagttgttgcacgtctgctgtctcgccgtgtttgtccgaaatgcgggcgtagttacaacatgatttttctgccaccaaaagaagacgagctgtgtgacgattgcggtgtccgcttagtacagcgttttgatgataaggaagaaacggtccgtcaccgcctgaaagtctaccgtgagaagacccagccggtcattgactattatagtaagaaaggtattctcgcacgcgtagatgggagccaagaaatccggcctatcgtggcagaagtcctggggattctgggtgtgagcgataag

SEQ ID NO: 2614 - protein, 231 aa, synthetic construct
  REGION 1..231: note = variant of adenylate kinase from Thermotoga neapolitana
MHHHHHHGGSGMGAYLVLLGPPGAGKGTQGRIISAKTGIPHISTGDILRDIVAKQNDEVASSIKEWMLKGELVPDEIGNPVVKRRLKEKDCEKGFILDGFPRTVKQAEYLDSFLESQGRQLTAAVLIEVPEDEVVARLLSRRVCPKCGRSYNMIFLPPKEDELCDDCGVRLVQRFDDKEETVRHRLKVYREKTQPVIDYYSKKGILARVDGSQEIRPIVAEVLGILGVSDK

SEQ ID NO: 2615 - DNA, 693 bp, synthetic construct
  misc_feature 1..693: note = variant of adenylate kinase from Thermotoga neapolitana
  source 1..693: mol_type = other DNA
atgcaccatcatcaccatcacgggggctccggcatgggggcatatctggtgttattaggtccgccgggcgcgggaaaaggtacccaaggccgtattatttcggcaaagactggcatcccgcatattagcacgggcgatatcctgcgtcagatcgtcgctaagcaaaacgatgaagttgcctcgagcattaaagagtggatgctgaaaggtgaactcgttccagatgaaattggtaatcctgtagtgaaacgccgcctgaaggagaaagactgcgaaaaaggctttattttggatggtttcccgcgtaccgtgcgccaagcggaatatctggatagttttcttgaaagccagggccgccagttgacagccgccgtgctgcttgaggtccccgaagatgaagttgttgcacgtctgctgtctcgccgggtttgtccgaaatgcgggcgtagttacaacatgatttttctgccaccaaaagaagacgagctgtgtgacgattgcggtgtcagcttagtacggcgtttagatgataaggaagaaacggtccgtatgcgcctgaaagtctaccgtgagaagacccagccggtcattgactattatagtaagaaaggtattctcgcacgcgtagatgggagccaagaaatccgccctatcgtggcagaagtcctggggattctgggttggagcgataag

SEQ ID NO: 2616 - protein, 231 aa, synthetic construct
  REGION 1..231: note = variant of adenylate kinase from Thermotoga neapolitana
MHHHHHHGGSGMGAYLVLLGPPGAGKGTQGRIISAKTGIPHISTGDILRQIVAKQNDEVASSIKEWMLKGELVPDEIGNPVVKRRLKEKDCEKGFILDGFPRTVRQAEYLDSFLESQGRQLTAAVLLEVPEDEVVARLLSRRVCPKCGRSYNMIFLPPKEDELCDDCGVSLVRRLDDKEETVRMRLKVYREKTQPVIDYYSKKGILARVDGSQEIRPIVAEVLGILGWSDK

SEQ ID NO: 2617 - DNA, 693 bp, synthetic construct
  misc_feature 1..693: note = variant of adenylate kinase from Thermotoga neapolitana
  source 1..693: mol_type = other DNA
atgcaccatcatcaccatcacgggggctccggcatgggggcatatctggtgttattaggtccgccgggcgcgggaaaaggtacccaaggccgtattatttcggcaaagactggcatcccgcatattagcacgggcgatatcctgcgtcagatcgtcgctaagcaaaacgatgaagttgcctcgagcattaaagagtggatgctgaaaggtgaactcgttccagatgaaattggtaatcctgtagtgaaacgccgcctgaaggagaaagactgcgaaaaaggctttattttggatggtttcccgcgtaccgtgcgccaagcggaatatctggatagttttcttgaaagccagggccgccagttgacagccgccgtgctgattgaggtccccgaagatgaagttgttgcacgtctgctgtctcgcatggtttgtccgaaatgcgggcgtagttacaacatgatttttctgccaccaaaagaagacgagctgtgtgacgattgcggtgtcagcttagtacagcgtttagatgataaggaagaaacggtccgtatgcgcctgaaagtctaccgtgagaagacccagccggtcattgactattatagtaagaaaggtattctcgcacgcgtagatgggagccaagaaatcatgcctatcgtggcagaagtcctggggattctgggttggagcgataag

SEQ ID NO: 2618 - protein, 231 aa, synthetic construct
  REGION 1..231: note = variant of adenylate kinase from Thermotoga neapolitana
MHHHHHHGGSGMGAYLVLLGPPGAGKGTQGRIISAKTGIPHISTGDILRQIVAKQNDEVASSIKEWMLKGELVPDEIGNPVVKRRLKEKDCEKGFILDGFPRTVRQAEYLDSFLESQGRQLTAAVLIEVPEDEVVARLLSRMVCPKCGRSYNMIFLPPKEDELCDDCGVSLVQRLDDKEETVRMRLKVYREKTQPVIDYYSKKGILARVDGSQEIMPIVAEVLGILGWSDK

SEQ ID NO: 2619 - DNA, 693 bp, synthetic construct
  misc_feature 1..693: note = variant of adenylate kinase from Thermotoga neapolitana
  source 1..693: mol_type = other DNA
atgcaccatcatcaccatcacgggggctccggcatgggggcatatctggtgttattaggtccgccgggcgcgggaaaaggtacccaaggccgtattatttcggcaaagactggcatcccgcatattagcacgggcgatatcctgcgtcagatcgtcgctaagcaaaacgatgaagttgcctcgagcattaaagagtggatgctgaaaggtgaactcgttccagatgaaattggtaatcctgtactgaaacgccgcctgaaggagaaagactgcgaaaaaggctttattttggatggtttcccgcgtaccgtgcgccaagcggaatatctggatagttttcttgaaagccagggccgccagttgacagccgccgtgctgcttgaggtccccgaagatgaagttgttgcacgtctgctgtctcgccgggtttgtccgaaatgcgggcgtagttacaacatgatttttctgccaccaaaagaagacgagctgtgtgacgattgcggtgtcagcttagtacagcgtttagatgataaggaagaaacggtccgtcatcgcctgaaagtctaccgtgagaagacccagccggtcattgactattatagtaagaaaggtattctcgcacgcgtagatgggagccaagaaatcatgcctatcgtggcagaagtcctggggattctgggttggagcgataag

SEQ ID NO: 2620 - protein, 231 aa, synthetic construct
  REGION 1..231: note = variant of adenylate kinase from Thermotoga neapolitana
MHHHHHHGGSGMGAYLVLLGPPGAGKGTQGRIISAKTGIPHISTGDILRQIVAKQNDEVASSIKEWMLKGELVPDEIGNPVLKRRLKEKDCEKGFILDGFPRTVRQAEYLDSFLESQGRQLTAAVLLEVPEDEVVARLLSRRVCPKCGRSYNMIFLPPKEDELCDDCGVSLVQRLDDKEETVRHRLKVYREKTQPVIDYYSKKGILARVDGSQEIMPIVAEVLGILGWSDK

SEQ ID NO: 2621 - DNA, 693 bp, synthetic construct
  misc_feature 1..693: note = variant of adenylate kinase from Thermotoga neapolitana
  source 1..693: mol_type = other DNA
atgcaccatcatcaccatcacgggggctccggcatgggggcatatctggtgttattaggtccgccgggcgcgggaaaaggtacccaaggccgtattatttcggcaaagactggcatcccgcatattagcacgggcgatatcctgcgtcagatcgtcgctaagcaaaacgatgaagttgcctcgagcattaaagagtggatgctgaaaggtgaactcgttccagatgaaattggtaatcctgtagtaaaacgccgcctgaaggagaaagactgcgaaaaaggctttattttggatggtttcccgcgtaccgtgcgccaagcggaatatctggatagttttcttgaaagccagggccgccagttgacagccgccgtgctgattgaggtccccgaagatgaagttgttgcacgtctgctgtctcgccgtgtttgtccgaaatgcgggcgtagttacaacatgatttttctgccaccaaaagaagacgagctgtgtgacgattgcggtgtcagcttagtacagcgtttagatgataaggaagaaacggtccgtcaccgcctgaaagtctaccgtgagaagacccagccggtcattgactattatagtaagaaaggtattctcgcacgcgtagatgggagccaagaaatccggcctatcgtggcagaagtcctggggattctgggttggagcgataag

SEQ ID NO: 2622 - protein, 231 aa, synthetic construct
  REGION 1..231: note = variant of adenylate kinase from Thermotoga neapolitana
MHHHHHHGGSGMGAYLVLLGPPGAGKGTQGRIISAKTGIPHISTGDILRQIVAKQNDEVASSIKEWMLKGELVPDEIGNPVVKRRLKEKDCEKGFILDGFPRTVRQAEYLDSFLESQGRQLTAAVLIEVPEDEVVARLLSRRVCPKCGRSYNMIFLPPKEDELCDDCGVSLVQRLDDKEETVRHRLKVYREKTQPVIDYYSKKGILARVDGSQEIRPIVAEVLGILGWSDK

SEQ ID NO: 2623 - DNA, 693 bp, synthetic construct
  misc_feature 1..693: note = variant of adenylate kinase from Thermotoga neapolitana
  source 1..693: mol_type = other DNA
atgcaccatcatcaccatcacgggggctccggcatgggggcatatctggtgttattaggtccgccgggcgcgggaaaaggtacccaaggccgtattatttcggcaaagactggcatcccgcatattagcacgggcgatatcctgcgtcagatcgtcgctaagcaaaacgatgaagttgcctcgagcattaaagagtggatgctgaaaggtgaactcgttccagatgaaattggtaatcctgtactgaaacgccgcctgaaggagaaagactgcgaaaaaggctttattttggatggtttcccgcgtaccgtgcgccaagcggaatatctggatagttttcttgaaagccagggccgccagttgacagccgccgtgctgattgaggtccccgaagatgaagttgttgcacgtctgctgtctcgccgtgtttgtccgaaatgcgggcgtagttacaacatgatttttctgccaccaaaagaagacgagctgtgtgacgattgcggtgtcagcttagtaacccgtttagatgataaggaagaaacggtccgtcatcgcctgaaagtctaccgtgagaagacccagccggtcattgactattatagtaagaaaggtattctcgcacgcgtagatgggagccaagaaatcatgcctatcgtggcagaagtcctggggattctgggttggagcgataag

SEQ ID NO: 2624 - protein, 231 aa, synthetic construct
  REGION 1..231: note = variant of adenylate kinase from Thermotoga neapolitana
MHHHHHHGGSGMGAYLVLLGPPGAGKGTQGRIISAKTGIPHISTGDILRQIVAKQNDEVASSIKEWMLKGELVPDEIGNPVLKRRLKEKDCEKGFILDGFPRTVRQAEYLDSFLESQGRQLTAAVLIEVPEDEVVARLLSRRVCPKCGRSYNMIFLPPKEDELCDDCGVSLVTRLDDKEETVRHRLKVYREKTQPVIDYYSKKGILARVDGSQEIMPIVAEVLGILGWSDK

SEQ ID NO: 2625 - DNA, 693 bp, synthetic construct
  misc_feature 1..693: note = variant of adenylate kinase from Thermotoga neapolitana
  source 1..693: mol_type = other DNA
atgcaccatcatcaccatcacgggggctccggcatgggggcatatctggtgttattaggtccgccgggcgcgggaaaaggtacccaaggccgtattatttcggcaaagactggcatcccgcatattagcacgggcgatatcctgcgtcagatcgtcgctaagcaaaacgatgaagttgcctcgagcattaaagagtggatgctgaaaggtgaactcgttccagatgaaattggtaatcctgtagtgaaacgccgcctgaaggagaaagactgcgaaaaaggctttattttggatggtttcccgcgtaccgtgcgccaagcggaatatctggatagttttcttgaaagccagggccgccagttgacagccgccgtgctgcttgaggtccccgaagatgaagttgttgcacgtctgctgtctcgctgggtttgtccgaaatgcgggcgtagttacaacatgatttttctgccaccaaaagaagacgagctgtgtgacgattgcggtgtcagcttagtacagcgtttagatgataaggaagaaacggtccgtatgcgcctgaaagtctaccgtgagaagacccagccggtcattgactattatagtaagaaaggtattctcgcacgcgtagatgggagccaagaaatcatgcctatcgtggcagaagtcctggggattctgggttggagcgataag

SEQ ID NO: 2626 - protein, 231 aa, synthetic construct
  REGION 1..231: note = variant of adenylate kinase from Thermotoga neapolitana
MHHHHHHGGSGMGAYLVLLGPPGAGKGTQGRIISAKTGIPHISTGDILRQIVAKQNDEVASSIKEWMLKGELVPDEIGNPVVKRRLKEKDCEKGFILDGFPRTVRQAEYLDSFLESQGRQLTAAVLLEVPEDEVVARLLSRWVCPKCGRSYNMIFLPPKEDELCDDCGVSLVQRLDDKEETVRMRLKVYREKTQPVIDYYSKKGILARVDGSQEIMPIVAEVLGILGWSDK

SEQ ID NO: 2627 - DNA, 693 bp, synthetic construct
  misc_feature 1..693: note = variant of adenylate kinase from Thermotoga neapolitana
  source 1..693: mol_type = other DNA
atgcaccatcatcaccatcacgggggctccggcatgggggcatatctggtgttattaggtccgccgggcgcgggaaaaggtacccaaggccgtattatttcggcaaagactggcatcccgcatattagcacgggcgatatcctgcgtcagatcgtcgctaagcaaaacgatgaagttgcctcgagcattaaagagtggatgctgaaaggtgaactcgttccagatgaaattggtaatcctgtactgaaacgccgcctgaaggagaaagactgcgaaaaaggctttattttggatggtttcccgcgtaccgtgcgccaagcggaatatctggatagttttcttgaaagccagggccgccagttgacagccgccgtgctgcttgaggtccccgaagatgaagttgttgcacgtctgctgtctcgccgtgtttgtccgaaatgcgggcgtagttacaacatgatttttctgccaccaaaagaagacgagctgtgtgacgattgcggtgtcagcttagtacagcgtttagatgataaggaagaaacggtccgtcaccgcctgaaagtctaccgtgagaagacccagccggtcattgactattatagtaagaaaggtattctcgcacgcgtagatgggagccaagaaatccgccctatcgtggcagaagtcctggggattctgggttggagcgataag

SEQ ID NO: 2628 - protein, 231 aa, synthetic construct
  REGION 1..231: note = variant of adenylate kinase from Thermotoga neapolitana
MHHHHHHGGSGMGAYLVLLGPPGAGKGTQGRIISAKTGIPHISTGDILRQIVAKQNDEVASSIKEWMLKGELVPDEIGNPVLKRRLKEKDCEKGFILDGFPRTVRQAEYLDSFLESQGRQLTAAVLLEVPEDEVVARLLSRRVCPKCGRSYNMIFLPPKEDELCDDCGVSLVQRLDDKEETVRHRLKVYREKTQPVIDYYSKKGILARVDGSQEIRPIVAEVLGILGWSDK

SEQ ID NO: 2629 - DNA, 693 bp, synthetic construct
  misc_feature 1..693: note = variant of adenylate kinase from Thermotoga neapolitana
  source 1..693: mol_type = other DNA
atgcaccatcatcaccatcacgggggctccggcatgggggcatatctggtgttattaggtccgccgggcgcgggaaaaggtacccaaggccgtattatttcggcaaagactggcatcccgcatattagcacgggcgatatcctgcgtgacatcgtcgctaagcaaaacgatgaagttgcctcgagcattaaagaatggatgctgaaaggtgaactcgttccagatgaaattggtaatcctgtagtaaaacgccgcctgaaggagaaagactgcgaaaaaggctttattttggatggtttcccgcgtaccgtgcgccaagcggaatatctggatagttttcttgaaagccagggccgccagttgacagccgccgtgctgattgaggtccccgaagatgaagttgttgtgcgtctgctgtctcgccgtgtttgtccgaaatgcgggcgtagttacaacatgatttttctgccaccaaaagaagacgagctgtgtgacgattgcggtgtcagcttagtacagcgtttagatgataaggaagaaacggtccgtcaccgcctgaaagtctaccgtgagaagacccagccggtcattgactattatagtaagaaaggtattctcgcacgcgtagatgggagccaagaaatccggcctatcgtggcagaagtcctggggattctgggtgtgagcgataag

SEQ ID NO: 2630 - protein, 231 aa, synthetic construct
  REGION 1..231: note = variant of adenylate kinase from Thermotoga neapolitana
MHHHHHHGGSGMGAYLVLLGPPGAGKGTQGRIISAKTGIPHISTGDILRDIVAKQNDEVASSIKEWMLKGELVPDEIGNPVVKRRLKEKDCEKGFILDGFPRTVRQAEYLDSFLESQGRQLTAAVLIEVPEDEVVVRLLSRRVCPKCGRSYNMIFLPPKEDELCDDCGVSLVQRLDDKEETVRHRLKVYREKTQPVIDYYSKKGILARVDGSQEIRPIVAEVLGILGVSDK

SEQ ID NO: 2631 - DNA, 693 bp, synthetic construct
  misc_feature 1..693: note = variant of adenylate kinase from Thermotoga neapolitana
  source 1..693: mol_type = other DNA
atgcaccatcatcaccatcacgggggctccggcatgggggcatatctggtgttattaggtccgccgggcgcgggaaaaggtacccaaggccgtattatttcggcaaagactggcatcccgcatattagcacgggcgatatcctgcgtgacatcgtcgctaagcaaaacgatgaagttgcctcgagcattaaagaatggatgctgaaaggtgaactcgttccagatgaaattggtaatcctgtagtaaaacgccgcctgaaggagaaagactgcgaaaaaggctttattttggatggtttcccgcgtaccgtgaaacaagcggaatatctggatagttttcttgaaagccagggccgccagttgacagccgccgtgctgattgaggtccccgaagatgaagttgttgtgcgtctgctgtctcgccgtgtttgtccgaaatgcgggcgtagttacaacatgatttttctgccaccaaaagaagacgagctgtgtgacgattgcggtgtcagcttagtacagcgtttagatgataaggaagaaacggtccgtcaccgcctgaaagtctaccgtgagaagacccagccggtcattgactattatagtaagaaaggtattctcgcacgcgtagatgggagccaagaaatccggcctatcgtggcagaagtcctggggattctgggttggagcgataag

SEQ ID NO: 2632 - protein, 231 aa, synthetic construct
  REGION 1..231: note = variant of adenylate kinase from Thermotoga neapolitana
MHHHHHHGGSGMGAYLVLLGPPGAGKGTQGRIISAKTGIPHISTGDILRDIVAKQNDEVASSIKEWMLKGELVPDEIGNPVVKRRLKEKDCEKGFILDGFPRTVKQAEYLDSFLESQGRQLTAAVLIEVPEDEVVVRLLSRRVCPKCGRSYNMIFLPPKEDELCDDCGVSLVQRLDDKEETVRHRLKVYREKTQPVIDYYSKKGILARVDGSQEIRPIVAEVLGILGWSDK

SEQ ID NO: 2633 - DNA, 693 bp, synthetic construct
  misc_feature 1..693: note = variant of adenylate kinase from Thermotoga neapolitana
  source 1..693: mol_type = other DNA
atgcaccatcatcaccatcacgggggctccggcatgggggcatatctggtgttattaggtccgccgggcgcgggaaaaggtacccaaggccgtattatttcggcaaagactggcatcccgcatattagcacgggcgatatcctgcgtgacatcgtcgctaagcaaaacgatgaagttgcctcgagcattaaagaatggatgctgaaaggtgaactcgttccagatgaaattggtaatcctgtagtaaaacgccgcctgaaggagaaagactgcgaaaaaggctttattttggatggtttcccgcgtaccgtgaaacaagcggaatatctggatagttttcttgaaagccagggccgccagttgacagccgccgtgctgattgaggtccccgaagatgaagttgttgcacgtctgctgtctcgccgtgtttgtccgaaatgcgggcgtagttacaacatgatttttctgccaccaaaagaagacgagctgtgtgacgattgcggtgtcagcttagtacagcgtttagatgataaggaagaaacggtccgtcaccgcctgaaagtctaccgtgagaagacccagccggtcattgactattatagtaagaaaggtattctcgcacgcgtagatgggagccaagaaatccggcctatcgtggcagaagtcctggggattctgggtgtgagcgataag

SEQ ID NO: 2634 - protein, 231 aa, synthetic construct
  REGION 1..231: note = variant of adenylate kinase from Thermotoga neapolitana
MHHHHHHGGSGMGAYLVLLGPPGAGKGTQGRIISAKTGIPHISTGDILRDIVAKQNDEVASSIKEWMLKGELVPDEIGNPVVKRRLKEKDCEKGFILDGFPRTVKQAEYLDSFLESQGRQLTAAVLIEVPEDEVVARLLSRRVCPKCGRSYNMIFLPPKEDELCDDCGVSLVQRLDDKEETVRHRLKVYREKTQPVIDYYSKKGILARVDGSQEIRPIVAEVLGILGVSDK

SEQ ID NO: 2635 - DNA, 693 bp, synthetic construct
  misc_feature 1..693: note = variant of adenylate kinase from Thermotoga neapolitana
  source 1..693: mol_type = other DNA
atgcaccatcatcaccatcacgggggctccggcatgggggcatatctggtgttattaggtccgccgggcgcgggaaaaggtacccaaggccgtattatttcggcaaagactggcatcccgcatattagcacgggcgatatcctgcgtgacatcgtcgctaagcaaaacgatgaagttgcctcgagcattaaagaatggatgctgaaaggtgaactcgttccagatgaaattggtaatcctgtagtaaaacgccgcctgaaggagaaagactgcgaaaaaggctttattttggatggtttcccgcgtaccgtgaaacaagcggaatatctggatagttttcttgaaagccagggccgccagttgacagccgccgtgctgattgaggtccccgaagatgaagttgttgtgcgtctgctgtctcgccgtgtttgtccgaaatgcgggcgtagttacaacatgatttttctgccaccaaaagaagacgagctgtgtgacgattgcggtgtcagcttagtacagcgttttgatgataaggaagaaacggtccgtcaccgcctgaaagtctaccgtgagaagacccagccggtcattgactattatagtaagaaaggtattctcgcacgcgtagatgggagccaagaaatccggcctatcgtggcagaagtcctggggattctgggtgtgagcgataag

SEQ ID NO: 2636 - protein, 231 aa, synthetic construct
  REGION 1..231: note = variant of adenylate kinase from Thermotoga neapolitana
MHHHHHHGGSGMGAYLVLLGPPGAGKGTQGRIISAKTGIPHISTGDILRDIVAKQNDEVASSIKEWMLKGELVPDEIGNPVVKRRLKEKDCEKGFILDGFPRTVKQAEYLDSFLESQGRQLTAAVLIEVPEDEVVVRLLSRRVCPKCGRSYNMIFLPPKEDELCDDCGVSLVQRFDDKEETVRHRLKVYREKTQPVIDYYSKKGILARVDGSQEIRPIVAEVLGILGVSDK

SEQ ID NO: 2637 - DNA, 693 bp, synthetic construct
  misc_feature 1..693: note = variant of adenylate kinase from Thermotoga neapolitana
  source 1..693: mol_type = other DNA
atgcaccatcatcaccatcacgggggctccggcatgggggcatatctggtgttattaggtccgccgggcgcgggaaaaggtacccaaggccgtattatttcggcaaagactggcatcccgcatattagcacgggcgatatcctgcgtgacatcgtcgctaagcaaaacgatgaagttgcctcgagcattaaagagtggatgctgaaaggtgaactcgttccagatgaaattggtaatcctgtagtaaaacgccgcctgaaggagaaagactgcgaaaaaggctttattttggatggtttcccgcgtaccgtgcgccaagcggaatatctggatagttttcttgaaagccagggccgccagttgacagccgccgtgctgattgaggtccccgaagatgaagttgttgcacgtctgctgtctcgccgtgtttgtccgaaatgcgggcgtagttacaacatgatttttctgccaccaaaagaagacgagctgtgtgacgattgcggtgtcagcttagtaacccgtttagatgataaggaagaaacggtccgtcaccgcctgaaagtctaccgtgagaagacccagccggtcattgactattatagtaagaaaggtattctcgcacgcgtagatgggagccaagaaatcatgcctatcgtggcagaagtcctggggattctgggttggagcgataag

SEQ ID NO: 2638 - protein, 231 aa, synthetic construct
  REGION 1..231: note = variant of adenylate kinase from Thermotoga neapolitana
MHHHHHHGGSGMGAYLVLLGPPGAGKGTQGRIISAKTGIPHISTGDILRDIVAKQNDEVASSIKEWMLKGELVPDEIGNPVVKRRLKEKDCEKGFILDGFPRTVRQAEYLDSFLESQGRQLTAAVLIEVPEDEVVARLLSRRVCPKCGRSYNMIFLPPKEDELCDDCGVSLVTRLDDKEETVRHRLKVYREKTQPVIDYYSKKGILARVDGSQEIMPIVAEVLGILGWSDK

SEQ ID NO: 2639 - DNA, 693 bp, synthetic construct
  misc_feature 1..693: note = variant of adenylate kinase from Thermotoga neapolitana
  source 1..693: mol_type = other DNA
atgcaccatcatcaccatcacgggggctccggcatgggggcatatctggtgttattaggtccgccgggcgcgggaaaaggtacccaaggccgtattatttcggcaaagactggcatcccgcatattagcacgggcgatatcctgcgtcagatcgtcgctaagcaaaacgatgaagttgcctcgagcattaaagagtggatgctgaaaggtgaactcgttccagatgaaattggtaatcctgtagtaaaacgccgcctgaaggagaaagactgcgaaaaaggctttattttggatggtttcccgcgtaccgtgcgccaagcggaatatctggatagttttcttgaaagccagggccgccagttgacagccgccgtgctgattgaggtccccgaagatgaagttgttgcacgtctgctgtctcgccgtgtttgtccgaaatgcgggcgtagttacaacatgatttttctgccaccaaaagaagacgagctgtgtgacgattgcggtgtcagcttagtaacccgtttagatgataaggaagaaacggtccgtcatcgcctgaaagtctaccgtgagaagacccagccggtcattgactattatagtaagaaaggtattctcgcacgcgtagatgggagccaagaaatccggcctatcgtggcagaagtcctggggattctgggttggagcgataag

SEQ ID NO: 2640 - protein, 231 aa, synthetic construct
  REGION 1..231: note = variant of adenylate kinase from Thermotoga neapolitana
MHHHHHHGGSGMGAYLVLLGPPGAGKGTQGRIISAKTGIPHISTGDILRQIVAKQNDEVASSIKEWMLKGELVPDEIGNPVVKRRLKEKDCEKGFILDGFPRTVRQAEYLDSFLESQGRQLTAAVLIEVPEDEVVARLLSRRVCPKCGRSYNMIFLPPKEDELCDDCGVSLVTRLDDKEETVRHRLKVYREKTQPVIDYYSKKGILARVDGSQEIRPIVAEVLGILGWSDK

SEQ ID NO: 2641 - DNA, 693 bp, synthetic construct
  misc_feature 1..693: note = variant of adenylate kinase from Thermotoga neapolitana
  source 1..693: mol_type = other DNA
atgcaccatcatcaccatcacgggggctccggcatgggggcatatctggtgttattaggtccgccgggcgcgggaaaaggtacccaaggccgtattatttcggcaaagactggcatcccgcatattagcacgggcgatatcctgcgtgacatcgtcgctaagcaaaacgatgaagttgcctcgagcattaaagagtggatgctgaaaggtgaactcgttccagatgaaattggtaatcctgtagtaaaacgccgcctgaaggagaaagactgcgaaaaaggctttattttggatggtttcccgcgtaccgtgcgccaagcggaatatctggatagttttcttgaaagccagggccgccagttgacagccgccgtgctgattgaggtccccgaagatgaagttgttgcgcgtctgctgtctcgccgtgtttgtccgaaatgcgggcgtagttacaacatgatttttctgccaccaaaagaagacgagctgtgtgacgattgcggtgtcagcttagtacagcgtttagatgataaggaagaaacggtccgtcaccgcctgaaagtctaccgtgagaagacccagccggtcattgactattatagtaagaaaggtattctcgcacgcgtagatgggagccaagaaatccggcctatcgtggcagaagtcctggggattctgggtgtgagcgataag

SEQ ID NO: 2642 - protein, 231 aa, synthetic construct
  REGION 1..231: note = variant of adenylate kinase from Thermotoga neapolitana
MHHHHHHGGSGMGAYLVLLGPPGAGKGTQGRIISAKTGIPHISTGDILRDIVAKQNDEVASSIKEWMLKGELVPDEIGNPVVKRRLKEKDCEKGFILDGFPRTVRQAEYLDSFLESQGRQLTAAVLIEVPEDEVVARLLSRRVCPKCGRSYNMIFLPPKEDELCDDCGVSLVQRLDDKEETVRHRLKVYREKTQPVIDYYSKKGILARVDGSQEIRPIVAEVLGILGVSDK

SEQ ID NO: 2643 - DNA, 693 bp, synthetic construct
  misc_feature 1..693: note = variant of adenylate kinase from Thermotoga neapolitana
  source 1..693: mol_type = other DNA
atgcaccatcatcaccatcacgggggctccggcatgggggcatatctggtgttattaggtccgccgggcgcgggaaaaggtacccaaggccgtattatttcggcaaagactggcatcccgcatattagcacgggcgatatcctgcgtgatatcgtcgctaagcaaaacgatgaagttgcctcgagcattaaagagtggatgctgaaaggtgaactcgttccagatgaaattggtaatcctgtagtgaaacgccgcctgaaggagaaagactgcgaaaaaggctttattttggatggtttcccgcgtaccgtgcgccaagcggaatatctggatagttttcttgaaagccagggccgccagttgacagccgccgtgctgcttgaggtccccgaagatgaagttgttgcacgtctgctgtctcgccgggtttgtccgaaatgcgggcgtagttacaacatgatttttctgccaccaaaagaagacgagctgtgtgacgattgcggtgtcagcttagtacggcgtttagatgataaggaagaaacggtccgtcaccgcctgaaagtctaccgtgagaagacccagccggtcattgactattatagtaagaaaggtattctcgcacgcgtagatgggagccaagaaatccgccctatcgtggcagaagtcctggggattctgggttggagcgataag

SEQ ID NO: 2644 - protein, 231 aa, synthetic construct
  REGION 1..231: note = variant of adenylate kinase from Thermotoga neapolitana
MHHHHHHGGSGMGAYLVLLGPPGAGKGTQGRIISAKTGIPHISTGDILRDIVAKQNDEVASSIKEWMLKGELVPDEIGNPVVKRRLKEKDCEKGFILDGFPRTVRQAEYLDSFLESQGRQLTAAVLLEVPEDEVVARLLSRRVCPKCGRSYNMIFLPPKEDELCDDCGVSLVRRLDDKEETVRHRLKVYREKTQPVIDYYSKKGILARVDGSQEIRPIVAEVLGILGWSDK

SEQ ID NO: 2645 - DNA, 693 bp, synthetic construct
  misc_feature 1..693: note = variant of adenylate kinase from Thermotoga neapolitana
  source 1..693: mol_type = other DNA
atgcaccatcatcaccatcacgggggctccggcatgggggcatatctggtgttattaggtccgccgggcgcgggaaaaggtacccaaggccgtattatttcggcaaagactggcatcccgcatattagcacgggcgatatcctgcgtgacatcgtcgctaagcaaaacgatgaagttgcctcgagcattaaagaatggatgctgaaaggtgaactcgttccagatgaaattggtaatcctgtagtaaaacgccgcctgaaggagaaagactgcgaaaaaggctttattttggatggtttcccgcgtaccgtgaaacaagcggaatatctggatagttttcttgaaagccagggccgccagttgacagccgccgtgctgattgaggtccccgaagatgaagttgttgtgcgtctgctgtctcgccgtgtttgtccgaaatgcgggcgtagttacaacatgatttttctgccaccaaaagaagacgagctgtgtgacgattgcggtgtccgcttagtacagcgtttagatgataaggaagaaacggtccgtcaccgcctgaaagtctaccgtgagaagacccagggcgtcattgactattatagtaagaaaggtattctcgcacgcgtagatgggagccaagaaatccggcctatcgtggcagaagtcctggggattctgggttggagcgataag

SEQ ID NO: 2646 - protein, 231 aa, synthetic construct
  REGION 1..231: note = variant of adenylate kinase from Thermotoga neapolitana
MHHHHHHGGSGMGAYLVLLGPPGAGKGTQGRIISAKTGIPHISTGDILRDIVAKQNDEVASSIKEWMLKGELVPDEIGNPVVKRRLKEKDCEKGFILDGFPRTVKQAEYLDSFLESQGRQLTAAVLIEVPEDEVVVRLLSRRVCPKCGRSYNMIFLPPKEDELCDDCGVRLVQRLDDKEETVRHRLKVYREKTQGVIDYYSKKGILARVDGSQEIRPIVAEVLGILGWSDK

SEQ ID NO: 2647 - DNA, 693 bp, synthetic construct
  misc_feature 1..693: note = variant of adenylate kinase from Thermotoga neapolitana
  source 1..693: mol_type = other DNA
atgcaccatcatcaccatcacgggggctccggcatgggggcatatctggtgttattaggtccgccgggcgcgggaaaaggtacccaaggccgtattatttcggcaaagactggcatcccgcatattagcacgggcgatatcctgcgtcagatcgtcgctaagcaaaacgatgaagttgcctcgagcattaaagagtggatgctgaaaggtgaactcgttccagatgaaattggtaatcctgtactgaaacgccgcctgaaggagaaagactgcgaaaaaggctttattttggatggtttcccgcgtaccgtgcgccaagcggaatatctggatagttttcttgaaagccagggccgccagttgacagccgccgtgctgattgaggtccccgaagatgaagttgttgcacgtctgctgtctcgccgggtttgtccgaaatgcgggcgtagttacaacatgatttttctgccaccaaaagaagacgagctgtgtgacgattgcggtgtcagcttagtacagcgtttagatgataaggaagaaacggtccgtcaccgcctgaaagtctaccgtgagaagacccagccggtcattgactattatagtaagaaaggtattctcgcacgcgtagatgggagccaagaaatcatgcctatcgtggcagaagtcctggggattctgggttggagcgataag

SEQ ID NO: 2648 - protein, 231 aa, synthetic construct
  REGION 1..231: note = variant of adenylate kinase from Thermotoga neapolitana
MHHHHHHGGSGMGAYLVLLGPPGAGKGTQGRIISAKTGIPHISTGDILRQIVAKQNDEVASSIKEWMLKGELVPDEIGNPVLKRRLKEKDCEKGFILDGFPRTVRQAEYLDSFLESQGRQLTAAVLIEVPEDEVVARLLSRRVCPKCGRSYNMIFLPPKEDELCDDCGVSLVQRLDDKEETVRHRLKVYREKTQPVIDYYSKKGILARVDGSQEIMPIVAEVLGILGWSDK

SEQ ID NO: 2649 - DNA, 693 bp, synthetic construct
  misc_feature 1..693: note = variant of adenylate kinase from Thermotoga neapolitana
  source 1..693: mol_type = other DNA
atgcaccatcatcaccatcacgggggctccggcatgggggcatatctggtgttattaggtccgccgggcgcgggaaaaggtacccaaggccgtattatttcggcaaagactggcatcccgcatattagcacgggcgatatcctgcgtgacatcgtcgctaagcaaaacgatgaagttgcctcgagcattaaagaatggatgctgaaaggtgaactcgttccagatgaaattggtaatcctgtagtaaaacgccgcctgaaggagaaagactgcgaaaaaggctttattttggatggtttcccgcgtaccgtgcgccaagcggaatatctggatagttttcttgaaagccagggccgccagttgacagccgccgtgctgattgaggtccccgaagatgaagttgttgcacgtctgctgtctcgccgtgtttgtccgaaatgcgggcgtagttacaacatgatttttctgccaccaaaagaagacgagctgtgtgacgattgcggtgtcagcttagtacagcgttttgatgataaggaagaaacggtccgtcaccgcctgaaagtctaccgtgagaagacccagccggtcattgactattatagtaagaaaggtattctcgcacgcgtagatgggagccaagaaatccggcctatcgtggcagaagtcctggggattctgggtgtgagcgataag

SEQ ID NO: 2650 - protein, 231 aa, synthetic construct
  REGION 1..231: note = variant of adenylate kinase from Thermotoga neapolitana
MHHHHHHGGSGMGAYLVLLGPPGAGKGTQGRIISAKTGIPHISTGDILRDIVAKQNDEVASSIKEWMLKGELVPDEIGNPVVKRRLKEKDCEKGFILDGFPRTVRQAEYLDSFLESQGRQLTAAVLIEVPEDEVVARLLSRRVCPKCGRSYNMIFLPPKEDELCDDCGVSLVQRFDDKEETVRHRLKVYREKTQPVIDYYSKKGILARVDGSQEIRPIVAEVLGILGVSDK

SEQ ID NO: 2651 - DNA, 693 bp, synthetic construct
  misc_feature 1..693: note = variant of adenylate kinase from Thermotoga neapolitana
  source 1..693: mol_type = other DNA
atgcaccatcatcaccatcacgggggctccggcatgggggcatatctggtgttattaggtccgccgggcgcgggaaaaggtacccaaggccgtattatttcggcaaagactggcatcccgcatattagcacgggcgatatcctgcgtcagatcgtcgctaagcaaaacgatgaagttgcctcgagcattaaagagtggatgctgaaaggtgaactcgttccagatgaaattggtaatcctgtactgaaacgccgcctgaaggagaaagactgcgaaaaaggctttattttggatggtttcccgcgtaccgtgcgccaagcggaatatctggatagttttcttgaaagccagggccgccagttgacagccgccgtgctgcttgaggtccccgaagatgaagttgttgcacgtctgctgtctcgcatggtttgtccgaaatgcgggcgtagttacaacatgatttttctgccaccaaaagaagacgagctgtgtgacgattgcggtgtcagcttagtacagcgtttagatgataaggaagaaacggtccgtatgcgcctgaaagtctaccgtgagaagacccagccggtcattgactattatagtaagaaaggtattctcgcacgcgtagatgggagccaagaaatcatgcctatcgtggcagaagtcctggggattctgggttggagcgataag

SEQ ID NO: 2652 - protein, 231 aa, synthetic construct
  REGION 1..231: note = variant of adenylate kinase from Thermotoga neapolitana
MHHHHHHGGSGMGAYLVLLGPPGAGKGTQGRIISAKTGIPHISTGDILRQIVAKQNDEVASSIKEWMLKGELVPDEIGNPVLKRRLKEKDCEKGFILDGFPRTVRQAEYLDSFLESQGRQLTAAVLLEVPEDEVVARLLSRMVCPKCGRSYNMIFLPPKEDELCDDCGVSLVQRLDDKEETVRMRLKVYREKTQPVIDYYSKKGILARVDGSQEIMPIVAEVLGILGWSDK

SEQ ID NO: 2653 - DNA, 18 bp, synthetic construct
  misc_feature 1..18: note = Modified oligo substrate or product
  modified_base 16: mod_base = OTHER; note = 2'-methoxyguanosine
  modified_base 17: mod_base = OTHER; note = 2'-methoxyadenosine
  modified_base 18: mod_base = OTHER; note = 2'-methoxycytidine
  source 1..18: mol_type = other DNA
tttttttttttttttnnn

SEQ ID NO: 2654 - DNA, 19 bp, synthetic construct
  misc_feature 1..19: note = Modified oligo substrate or product
  modified_base 16: mod_base = OTHER; note = 2'-methoxyguanosine
  modified_base 17: mod_base = OTHER; note = 2'-methoxyadenosine
  modified_base 18: mod_base = OTHER; note = 2'-methoxycytidine
  modified_base 19: mod_base = OTHER; note = 2'-fluoro guanosine
  source 1..19: mol_type = other DNA
tttttttttttttttnnnn

SEQ ID NO: 2655 - DNA, 19 bp, synthetic construct
  misc_feature 1..19: note = Modified oligo substrate or product
  modified_base 1: mod_base = OTHER; note = 2'-deoxythymidine with 6-carboxyfluorescein modification
  modified_base 16: mod_base = OTHER; note = 2'-methoxyguanosine
  modified_base 17: mod_base = OTHER; note = 2'-methoxyadenosine
  modified_base 18: mod_base = OTHER; note = 2'-methoxycytidine
  modified_base 19: mod_base = OTHER; note = 2'-fluoro guanosine
  source 1..19: mol_type = other DNA
nttttttttttttttnnnn

SEQ ID NO: 2656 - DNA, 19 bp, synthetic construct
  misc_feature 1..19: note = Modified oligo substrate or product
  modified_base 16: mod_base = OTHER; note = 2'-methoxyguanosine
  modified_base 17: mod_base = OTHER; note = 2'-methoxyadenosine
  modified_base 18: mod_base = OTHER; note = 2'-methoxycytidine
  modified_base 19: mod_base = OTHER; note = 2'-methoxyadenosine
  source 1..19: mol_type = other DNA
tttttttttttttttnnnn

SEQ ID NO: 2657 - DNA, 19 bp, synthetic construct
  misc_feature 1..19: note = Modified oligo substrate or product
  modified_base 1: mod_base = OTHER; note = 2'-deoxythymidine with 6-carboxyfluorescein modification
  modified_base 16: mod_base = OTHER; note = 2'-methoxyguanosine
  modified_base 17: mod_base = OTHER; note = 2'-methoxyadenosine
  modified_base 18: mod_base = OTHER; note = 2'-methoxycytidine
  modified_base 19: mod_base = OTHER; note = 2'-methoxyadenosine
  source 1..19: mol_type = other DNA
nttttttttttttttnnnn

SEQ ID NO: 2658 - DNA, 19 bp, synthetic construct
  misc_feature 1..19: note = Modified oligo substrate or product
  modified_base 16: mod_base = OTHER; note = 2'-methoxyguanosine
  modified_base 17: mod_base = OTHER; note = 2'-methoxyadenosine
  modified_base 18: mod_base = OTHER; note = 2'-methoxycytidine
  modified_base 19: mod_base = OTHER; note = 2'-methoxyuridine
  source 1..19: mol_type = other DNA
tttttttttttttttnnnn

SEQ ID NO: 2659 - DNA, 19 bp, synthetic construct
  misc_feature 1..19: note = Modified oligo substrate or product
  modified_base 16: mod_base = OTHER; note = 2'-methoxyguanosine
  modified_base 17: mod_base = OTHER; note = 2'-methoxyadenosine
  modified_base 18: mod_base = OTHER; note = 2'-methoxycytidine
  modified_base 19: mod_base = OTHER; note = 2'-methoxyguanosine
  source 1..19: mol_type = other DNA
tttttttttttttttnnnn

SEQ ID NO: 2660 - DNA, 19 bp, synthetic construct
  misc_feature 1..19: note = Modified oligo substrate or product
  modified_base 1: mod_base = OTHER; note = 2'-deoxythymidine with 6-carboxyfluorescein modification
  modified_base 16: mod_base = OTHER; note = 2'-methoxyguanosine
  modified_base 17: mod_base = OTHER; note = 2'-methoxyadenosine
  modified_base 18: mod_base = OTHER; note = 2'-methoxycytidine
  modified_base 19: mod_base = OTHER; note = 2'-methoxyguanosine
  source 1..19: mol_type = other DNA
nttttttttttttttnnnn

SEQ ID NO: 2661 - DNA, 963 bp, synthetic construct
  misc_feature 1..963: note = variant of adenosine kinase from Xanthemonas campestris
  source 1..963: mol_type = other DNA
atgcatcatcaccatcaccatggggggtccggtatgagtgcactcatttgcggttctttagcgtatgataacatcatgtggtttccggactatttcaagaaccatattctgcccgatcgtgttcaccgcctcaatgtcagctttctggtatttgacatgcgtcgtgaatttggaggctgtgccggcaacattgcgtacaatctgcatctgttgggtggtcgcccgatcgtaatggctacggtgggccaagatttcggtccgtatcgcgaacacttcgaaactctgggcattgacttatcccgcgtcaagatcatcgatgatctgagtacaccgcaggggttcattaccaccgacatggatcaaaaccagattacggcgtttcacagcggcgcaatgatgcgttcgtacgaaaatcacgttcgtgatgtgccgggtgttaccttgggcctcgtaggtcctgatggacgcgagggcatgatccaaaatgccgaagaatttgctgctatgggcattccgttcatttttgacccaggtcaggcagtgcctctgttcagcggcccggaactgcgcgaatttatcgaacaggcggactatgtggtggtcaacgattacgaaagccgccttcttcaagcccgtactggctggaacgagcaggacattgttagccgcgtgcaggcgtatatcaccacgcaaggttcggctggagccgtggtaatgacaccggagaagcgctacgttattccggctgctaaaacttctcgtgtcgttgatccaactggttgcggcgacgcgtttcgcgccggcctgatctatggtattcagcatgaatatgattggttgaccattggccgcatgggaaacttaatgggtgcgctgaaagtggaacaccctggcacccaaaatcagcgtttcacctttgccgaattcaacgaccggttcaaacaatattttggctacgcgctc

SEQ ID NO: 2662 - protein, 321 aa, synthetic construct
  REGION 1..321: note = variant of adenosine kinase from Xanthemonas campestris
MHHHHHHGGSGMSALICGSLAYDNIMWFPDYFKNHILPDRVHRLNVSFLVFDMRREFGGCAGNIAYNLHLLGGRPIVMATVGQDFGPYREHFETLGIDLSRVKIIDDLSTPQGFITTDMDQNQITAFHSGAMMRSYENHVRDVPGVTLGLVGPDGREGMIQNAEEFAAMGIPFIFDPGQAVPLFSGPELREFIEQADYVVVNDYESRLLQARTGWNEQDIVSRVQAYITTQGSAGAVVMTPEKRYVIPAAKTSRVVDPTGCGDAFRAGLIYGIQHEYDWLTIGRMGNLMGALKVEHPGTQNQRFTFAEFNDRFKQYFGYAL

SEQ ID NO: 2663 - DNA, 963 bp, synthetic construct
  misc_feature 1..963: note = variant of adenosine kinase from Xanthemonas campestris
  source 1..963: mol_type = other DNA
atgcatcatcaccatcaccatggggggtccggtatgagtgcactcatttgcggttctttagcgtatgataacatcatgtggtttccggactatttcaagaaccatattctgcccgatcgtgttcaccgcctcaatgtcagctttctggtatttgacatgcgtcgtgaatttggaggctgtgccggcaacattgcgtacaatctgcatctgttgggtggtcgcccgatcgtaatggctacggtgggccaagatttcggtccgtatcgcgaacacttcgaaactctgggcattgacttatcccgcgtcaagatcatcgatgatctgagtacaccgcaggggttcattaccaccgacatggatcaaaaccagattacgctgtttcacagcggcgcaatgatgcgttcgtacgaaaatcacgttcgtgatgtgccgggtgttaccttgggcctcgtaggtcctgatggccgcgagggcatgatccaaaatgccgaagaatttgctgctatgggcattccgttcatttttgacccaggtcaggcagtgcctctgttcagcggcccggaactgcgcgaatttatcgaacaggcggactatgtggtggtcaacgattacgaaagccgccttcttcaagcccgtactggctggaacgagcaggacattgttagccgcgtgcaggcgtatatcaccacgcaaggttcggctggagccgtggtaatgacaccggagaagcgctacgttattccggctgctaaaacttctcgtgtcgttgatccaactggttgcggcgacgcgtttcgcgccggcctgatctatggtattcagcatgaatatgattggttgaccattggccgcatgggaaacttaatgggtgcgctgaaagtggaacaccctggcggccaaaatcagcgtttcacctttgccgaattcaacgaccggttcaaacaatattttggctacgcgctc

SEQ ID NO: 2664 - protein, 321 aa, synthetic construct
  REGION 1..321: note = variant of adenosine kinase from Xanthemonas campestris
MHHHHHHGGSGMSALICGSLAYDNIMWFPDYFKNHILPDRVHRLNVSFLVFDMRREFGGCAGNIAYNLHLLGGRPIVMATVGQDFGPYREHFETLGIDLSRVKIIDDLSTPQGFITTDMDQNQITLFHSGAMMRSYENHVRDVPGVTLGLVGPDGREGMIQNAEEFAAMGIPFIFDPGQAVPLFSGPELREFIEQADYVVVNDYESRLLQARTGWNEQDIVSRVQAYITTQGSAGAVVMTPEKRYVIPAAKTSRVVDPTGCGDAFRAGLIYGIQHEYDWLTIGRMGNLMGALKVEHPGGQNQRFTFAEFNDRFKQYFGYAL

SEQ ID NO: 2665 - DNA, 963 bp, synthetic construct
  misc_feature 1..963: note = variant of adenosine kinase from Xanthemonas campestris
  source 1..963: mol_type = other DNA
atgcatcatcaccatcaccatggggggtccggtatgagtgcactcatttgcggttctttagcgtatgataacatcatgtggtttccggactatttcaagaaccatattctgcccgatcgtgttcaccgcctcaatgtcagctttctggtatttgacatgcgtcgtgaatttggaggctgtgccggcaacattgcgtacaatctgcatctgttgggtggtcgcccgatcgtaatggctacggtgggccaagatttcggtccgtatcgcgaacacttcgaaactctgggcattgacttatcccgcgtcaagatcatcgatgatctgagtacaccgcaggggttcattaccaccgacatggatcaaaaccagattacgctgtttcacagcggcgcaatgatgcgttcgtacgaaaatcacgttcgtgatgtgccgggtgttaccttgggcctcgtaggtcctgatggccgcgagggcatgatccaaaatgccgaagaatttgctgctatgggcattccgttcatttttgacccaggtcaggcagtgcctctgttcagcggcccggaactgcgcgaatttatcgaacaggcggactatgtggtggtcaacgattacgaaagccgccttcttcaagcccgtactggctggaacgagcaggacattgttagccgcgtgcaggcgtatatcaccacgcaaggttcggctggagccgtggtaatgacaccggagaagcgctacgttattccggctgctaaagcttctcgtgtcgttgatccaactggttgcggcgacgcgtttcgcgccggcctgatctatggtattcagcatgaatatgattggttgaccattggccgcatgggaaacttaatgggtgcgctgaaagtggaacaccctggcggccaaaatcagcgtttcacctttgccgaattcaacgaccggttcaaacaatattttggctacgcgctc

SEQ ID NO: 2666 - protein, 321 aa, synthetic construct
  REGION 1..321: note = variant of adenosine kinase from Xanthemonas campestris
MHHHHHHGGSGMSALICGSLAYDNIMWFPDYFKNHILPDRVHRLNVSFLVFDMRREFGGCAGNIAYNLHLLGGRPIVMATVGQDFGPYREHFETLGIDLSRVKIIDDLSTPQGFITTDMDQNQITLFHSGAMMRSYENHVRDVPGVTLGLVGPDGREGMIQNAEEFAAMGIPFIFDPGQAVPLFSGPELREFIEQADYVVVNDYESRLLQARTGWNEQDIVSRVQAYITTQGSAGAVVMTPEKRYVIPAAKASRVVDPTGCGDAFRAGLIYGIQHEYDWLTIGRMGNLMGALKVEHPGGQNQRFTFAEFNDRFKQYFGYAL

SEQ ID NO: 2667 - DNA, 1251 bp, synthetic construct
  misc_feature 1..1251: note = variant of acetate kinase from Marinitoga sp. 38H-ov
  source 1..1251: mol_type = other DNA
atgcaccatcatcatcatcatggcggtagcggcatgaaagttctggtgattaattctggtagctcctccatcaaatatcagctcctcgatatgaccaacgaaaaggtattagcgaaaggcttggtcgagcgcattggcatcgacggttcgcgtatcgtgcataaagttaacggcgaagggcacgtgctggaacatgagattaaaaatcacgaaattggacttaaattggtcctggatcttcttacggacgaaaaatacggtgtgttgaaggatctcaaagaaatcgatgcagttgggcatcgcgtagtacatggcggcgagcgttttgccagtagcgtgaagattactgacgaagtcttaaagaccatcgagacgttgtcgttcttagctccgttacacaatccagcgaacattatgggtatcaagagcagcatgaaagtgttaccgggtgtgcctcaagttgccgtctttgatacagcgttccaccagaagatgccggagaaagcctatttgtacgcaatcccctatgagtactacgagaaatataaaattcgccgctatgggtttcatggaacctcacatcgttatgtgagtaaacgtgctgcggaaattatgggcaaaccgtacgatcagctcaagatcattaccgttcacgtgggtaacggcgcatcagttgcggcggtgaagaatggcgtatctgttgacacttccatgggtttcacaccacttgaaggtcttgtcatgggcacgcgcagcggcgatattgatccggccatcgtggaatttcttgagaaagaagaaggattgtcggccaaagaagtcgtcaacatcctcaacaagaaatctggtgtgtatgggctcaccaaaggctttagtagtgacatgcgtgacattgtgctgaaggctattgaaggtgatcctgtagcgcgccttgcattagatgtgtattattatcgtatcgcgaaatatattggcgcatacgctgcggccatgaacggtgttgacgcgatcgtctttaccgcaggagttggcgaaaatagcccgattatgcgcgaagaaattattgagaactacttgggctacttagggatcaagatcgataaagaagccaatgacttcaaaggtgaggagaagatcatttcaacgcccgattccaaagtgattgcgatggtagttccgaccaacgaggagctcatgatcgccaaagacacgaaagaaatcattgagaaagggttggacgagcttaagatc

SEQ ID NO: 2668 - protein, 417 aa, synthetic construct
  REGION 1..417: note = variant of acetate kinase from Marinitoga sp. 38H-ov
MHHHHHHGGSGMKVLVINSGSSSIKYQLLDMTNEKVLAKGLVERIGIDGSRIVHKVNGEGHVLEHEIKNHEIGLKLVLDLLTDEKYGVLKDLKEIDAVGHRVVHGGERFASSVKITDEVLKTIETLSFLAPLHNPANIMGIKSSMKVLPGVPQVAVFDTAFHQKMPEKAYLYAIPYEYYEKYKIRRYGFHGTSHRYVSKRAAEIMGKPYDQLKIITVHVGNGASVAAVKNGVSVDTSMGFTPLEGLVMGTRSGDIDPAIVEFLEKEEGLSAKEVVNILNKKSGVYGLTKGFSSDMRDIVLKAIEGDPVARLALDVYYYRIAKYIGAYAAAMNGVDAIVFTAGVGENSPIMREEIIENYLGYLGIKIDKEANDFKGEEKIISTPDSKVIAMVVPTNEELMIAKDTKEIIEKGLDELKI

SEQ ID NO: 2669 - DNA, 1812 bp, synthetic construct
  misc_feature 1..1812: note = variant of pyruvate oxidase from Jeotgalibaca sp. PTS2502
  source 1..1812: mol_type = other DNA
atgcaccatcatcatcatcatggcggtagcggcatgaccgatggcaagacgaaagttagcactgcgatgctgaaagtattagctggttgggacgtggataccatttatggaatcccgtctggtacactggcaccattgatggaagcccttggcgagcaggaagaaaccgacatcaaatttctgcaagtcaaacatgaggaagttggtgcgatggccgcagtaatgcagtggaaatacaagggcaaactcggagtttgcgtgggttcaggcggtccgggcgctactcacttagcgaacggcctgtatgatgccgccatggataatacccctgtcctggcaattctgggaagtcgcccgcagcgtgaactgaacatggatgccttccaagagttgaatcagaaccccatgtttgcgaatattgcggtgtacaaccgccgcgtggcctatgcagaacagaccccgaaactcgtcgacgaagctatccgtacggccatttcgaaacgtggtgttgcggtgctggaagttccaggcgatttcggctttcatgagatcgcaaatgacgctttctatagcagcggtcactcctacaaagattatgttagttcggcgattaacgaagccgatatcgacgctgcggtcgaagtgctgaacaacagcgatcgcaccgtaatttacgcaggcatcggtacaatgggccatggtccggcggttcaagaactttctcgcaagattaaagcgcctatcattaccacgggcaagaattttgagacctttgaatgggacttcgaggccctgactggttcaacgtatcgtgtgggttggaaaccggcaaatgaagccgtcaaagaagctgataccgtgttgtttgttggcagcaacttcccgtttgcggagattgaaggtaccttctcaaatatcaagaaatttattcagatcgataacaatccccgcatgttaggaaaacgccacaatcctgacgtagcgattttaggcgatgccggtgaagcggtgcatagtctccttgagaaagtcactccagtggaagaatctgcctggtggaacgcgaacgtcaagaatgttcagaactggcgtgactacatgaacaaattggagcagaaagaaagcggcgatctgcaactgtatcaggtgtacaatgccatcaacaaatatgcagatgaagacgctatttattcgacggatgtaggcaattccacccaaaccagcattcgccatcttcacatgacgccgaagaatatgtggcgtacctcgccgttatttgcgacgatgggtatcgccttacctggcggcattgcagcgaagaacgtttacccagatcgccaggcttggaacttgatgggtgatggagcgttcaatatggtgtatccggacgtcgtaactaacgtgtggtacaatatgccggttatcaacgtggtgtttaccaacacagagtacggtttcattaagaacaaatatgaagataccaataagaacacgtttggcaccgaattcccggacgtcgattatgcaatgatcgctcaagcacagggcgctgtgggatttacggtctcacgcattgaagacatcgatcaggtaatggccgatgcggtgaaagcgtacaaagagggtaaaaccgtggttattgacgccaagatcaccaaagatcgtcccattccggtagaaacactcaaattagacccgcgcctttatagtgccgaagagatcaaagcgtacaaagagaaatatgaagctgaagaactcgttccattctccgagttcttgaaagcagaaggccttacgagcaaagtgtctaag

SEQ ID NO: 2670 - protein, 604 aa, synthetic construct
  REGION 1..604: note = variant of pyruvate oxidase from Jeotgalibaca sp. PTS2502
MHHHHHHGGSGMTDGKTKVSTAMLKVLAGWDVDTIYGIPSGTLAPLMEALGEQEETDIKFLQVKHEEVGAMAAVMQWKYKGKLGVCVGSGGPGATHLANGLYDAAMDNTPVLAILGSRPQRELNMDAFQELNQNPMFANIAVYNRRVAYAEQTPKLVDEAIRTAISKRGVAVLEVPGDFGFHEIANDAFYSSGHSYKDYVSSAINEADIDAAVEVLNNSDRTVIYAGIGTMGHGPAVQELSRKIKAPIITTGKNFETFEWDFEALTGSTYRVGWKPANEAVKEADTVLFVGSNFPFAEIEGTFSNIKKFIQIDNNPRMLGKRHNPDVAILGDAGEAVHSLLEKVTPVEESAWWNANVKNVQNWRDYMNKLEQKESGDLQLYQVYNAINKYADEDAIYSTDVGNSTQTSIRHLHMTPKNMWRTSPLFATMGIALPGGIAAKNVYPDRQAWNLMGDGAFNMVYPDVVTNVWYNMPVINVVFTNTEYGFIKNKYEDTNKNTFGTEFPDVDYAMIAQAQGAVGFTVSRIEDIDQVMADAVKAYKEGKTVVIDAKITKDRPIPVETLKLDPRLYSAEEIKAYKEKYEAEELVPFSEFLKAEGLTSKVSK

SEQ ID NO: 2671 - DNA, 1812 bp, synthetic construct
  misc_feature 1..1812: note = variant of pyruvate oxidase from Jeotgalibaca sp. PTS2502
  source 1..1812: mol_type = other DNA
atgcaccatcatcatcatcatggcggtagcggcatgaccgatggcaagacgaaagttagcactgcgatgctgaaagtattagctggttgggacgtggataccatttatggaatcccgtctggtacactggcaccattgatggaagcccttggcgagcaggaagaaaccgacatcaaatttctgcaagtcaaacatgaggaagttggtgcgatggccgcagtaatgcagtggaaatacaagggcaaactcggagtttgcgtgggttcaggcggtccgggcgctactcacttagcgaacggcctgtatgatgccgccatggataatacccctgtcctggcaattctgggatcgcgcccgcagcgtgaactgaacatggatgccttccaagagttgaatcaggtccccatgtttgcgaacattgcggtgtacaaccgccgcgtggcctatgcagaacagaccccgaaactcgtcgacgaagctatccgtacggccatttcgaaacgtggtgttgcggtgctggaagttccaggcgatttcggctttcatgagatcgcaaatgacgctttctatagcagcggtcactcctacaaagattatgttagttcggcgattaacgaagccgatatcgacgctgcggtcgaagtgctgaacaacagcgatcgcaccgtaatttacgcaggcatcggtacaatgggccatggtccggcggttcaagaactttctcgcaagattaaagcgcctatcattaccacgggcaagaattttgagacctttgaatgggacttcgaggccctgactggttcaacgtatcgtgtgggttggaaaccggcaaatgaagccgtcaaagaagctgataccgtgttgtttgttggcagcaacttcccgtttgcggagattgaaggtaccttctcaaatatcaagaaatttattcagatcgataacaatccccgcatgttaggaaaacgccacaatcctgacgtagcgattttagccgatgccggtgaagcggtgcatagtctccttgagaaagtcactccagtggaagaatctgcctggtggaacgcgaacgtcaagaatgttcagaactggcgtgactacatgaacaaattggagcagaaagaaagcggcgatctgcaactgtatcaggtgtacaatgccatcaacaaatatgcagatgaagacgctatttattcgacggatgtaggcaattccacccaaaccagcattcgccatcttcacatgacgccgaagaatatgtggcgtacctcgccgttatttgcgacgatgggtatcgccttacctggcggcattgcagcgaagaacgtttacccagatcgccaggcttggaacttgatgggtgatggagcgttcaatatggtgtatccggacgtcgtaactaacgtgtggtacaatatgccggttatcaacgtggtgtttaccaacacagagtacggtttcattaagaacaaatatgaagataccaataagaacacgtttggcaccgaattcccggacgtcgattatgcaatgatcgctcaagcacagggcgctgtgggatttacggtctcacgcattgaagacatcgatcaggtaatggccgatgcggtgaaagcgtacaaagagggtaaaaccgtggttattgacgccaagatcaccaaagatcgtcccattccggtagaaacactcaaattagacccgcgcctttatagtgccgaagagatcaaagcgtacaaagagaaatatgaagctgaagaactcgttccattctccgagttcttgaaagcagaaggccttacgagcaaagtgtctaag

SEQ ID NO: 2672 - protein, 604 aa, synthetic construct
  REGION 1..604: note = variant of pyruvate oxidase from Jeotgalibaca sp. PTS2502
MHHHHHHGGSGMTDGKTKVSTAMLKVLAGWDVDTIYGIPSGTLAPLMEALGEQEETDIKFLQVKHEEVGAMAAVMQWKYKGKLGVCVGSGGPGATHLANGLYDAAMDNTPVLAILGSRPQRELNMDAFQELNQVPMFANIAVYNRRVAYAEQTPKLVDEAIRTAISKRGVAVLEVPGDFGFHEIANDAFYSSGHSYKDYVSSAINEADIDAAVEVLNNSDRTVIYAGIGTMGHGPAVQELSRKIKAPIITTGKNFETFEWDFEALTGSTYRVGWKPANEAVKEADTVLFVGSNFPFAEIEGTFSNIKKFIQIDNNPRMLGKRHNPDVAILADAGEAVHSLLEKVTPVEESAWWNANVKNVQNWRDYMNKLEQKESGDLQLYQVYNAINKYADEDAIYSTDVGNSTQTSIRHLHMTPKNMWRTSPLFATMGIALPGGIAAKNVYPDRQAWNLMGDGAFNMVYPDVVTNVWYNMPVINVVFTNTEYGFIKNKYEDTNKNTFGTEFPDVDYAMIAQAQGAVGFTVSRIEDIDQVMADAVKAYKEGKTVVIDAKITKDRPIPVETLKLDPRLYSAEEIKAYKEKYEAEELVPFSEFLKAEGLTSKVSK

SEQ ID NO: 2673 - DNA, 1812 bp, synthetic construct
  misc_feature 1..1812: note = variant of pyruvate oxidase from Jeotgalibaca sp. PTS2502
  source 1..1812: mol_type = other DNA
atgcaccatcatcatcatcatggcggtagcggcatgaccgatagcaagacgaaagttagcactgcgatgctgaaagtattagctggttgggacgtggataccatttatggaatcccgtctggtacactggcaccattgatggaagcccttggcgagcaggaagaaaccgacatcaaatttctgcaagtcaaacatgaggaagttggtgcgatggccgcagtaatgcagtggaaatacaagggcaaactcggagtttgcgtgggttcaggcggtccgggcgctactcacttagcgaacggcctgtatgatgccgccatggataatacccctgtcctggcaattctgggatcgcgcccgcagcgtgaactgaacatggatgccttccaagagttgaatcaggtccccatgtttgcgaacattgcggtgtacaaccgccgcgtggcctatgcagaacagaccccgaaactcgtcgacgaagctatccgtacggccatttcgaaacgtggtgttgcggtgctggaagttccaggcgatttcggctttcatgaaatcgcaaatgacgctttctatagcagcggtcactcctacaaagattatgttagttcggcgattaacgaagccgatatcgacgctgcggtcgaagtgctgaacaacagcgatcgcaccgtaatttacgcaggcatcggtacaatgggccatggtccggcggttcaagaactttctcgcaagattaaagcgcctatcattaccacgggcaagaattttgagacctttgaatgggacttcgaggccctgactggttcaacgtatcgtgtgggttggaaaccggcaaatgaagccgtcaaagaagctgataccgtgttgtttgttggcagcaacttcccgtttgcggagattgaaggtaccttctcaaatatcaagaaatttattcagatcgataacaatccccgcatgttaggaaaacgccacaatcctgacgtagcgattttagccgatgccggtgaagcggtgcatagtctccttgagaaagtcactccagtggaagaatctgcctggtggaacgcgaacgtcaagaatgttcagaactggcgtgactacatgaacaaattggagcagaaagaaagcggcgatctgcaactgtatcaggtgtacaatgccatcaacaaatatgcagatgaagacgctatttattcgacggatgtaggcaattccacccaaaccagcattcgccatcttcacatgacgccgaagaatatgtggcgtacctcgccgttatttgcgacgatgggtatcgccttacctggcggcattgcagcgaagaacgtttacccagatcgccaggcttggaacttgatgggtgatggagcgttcaatatggtgtatccggacgtcgtaactaacgtgtggtacaatatgccggttatcaacgtggtgtttaccaacacagagtacggtttcattaagaacaaatatgaagataccaataagaacacgtttggcaccgaattcccggacgtcgattatgcaatgatcgctcaagcacagggcgctgtgggatttacggtctcacgcattgaagacatcgatcaggtaatggccgatgcggtgaaagcgtacaaagagggtaaaaccgtggttattgacgccaagatcaccaaagatcgtcccattccggtagaaacactcaaattagacccgcgcctttatagtgccgaagagatcaaagcgtacaaagagaaatatgaagctgaagaactcgttccattctccgagttcttgaaagcagaaggccttacgagcaaagtgtctaag

SEQ ID NO: 2674 - protein, 604 aa, synthetic construct
  REGION 1..604: note = variant of pyruvate oxidase from Jeotgalibaca sp. PTS2502
MHHHHHHGGSGMTDSKTKVSTAMLKVLAGWDVDTIYGIPSGTLAPLMEALGEQEETDIKFLQVKHEEVGAMAAVMQWKYKGKLGVCVGSGGPGATHLANGLYDAAMDNTPVLAILGSRPQRELNMDAFQELNQVPMFANIAVYNRRVAYAEQTPKLVDEAIRTAISKRGVAVLEVPGDFGFHEIANDAFYSSGHSYKDYVSSAINEADIDAAVEVLNNSDRTVIYAGIGTMGHGPAVQELSRKIKAPIITTGKNFETFEWDFEALTGSTYRVGWKPANEAVKEADTVLFVGSNFPFAEIEGTFSNIKKFIQIDNNPRMLGKRHNPDVAILADAGEAVHSLLEKVTPVEESAWWNANVKNVQNWRDYMNKLEQKESGDLQLYQVYNAINKYADEDAIYSTDVGNSTQTSIRHLHMTPKNMWRTSPLFATMGIALPGGIAAKNVYPDRQAWNLMGDGAFNMVYPDVVTNVWYNMPVINVVFTNTEYGFIKNKYEDTNKNTFGTEFPDVDYAMIAQAQGAVGFTVSRIEDIDQVMADAVKAYKEGKTVVIDAKITKDRPIPVETLKLDPRLYSAEEIKAYKEKYEAEELVPFSEFLKAEGLTSKVSK

SEQ ID NO: 2675 - DNA, 693 bp, synthetic construct
  misc_feature 1..693: note = variant of adenylate kinase from Thermotoga neapolitana
  source 1..693: mol_type = other DNA
atgcaccatcatcaccatcacgggggctccggcatgggggcatatctggtgttattaggtccgccgggcgcgggaaaaggtacccaaggccgtattatttcggcaaagactggcatcccgcatattagcacgggcgatatctttcgtgacatcgtcgctaagcaaaacgatgaagttgcctcgagcattaaagagtggatgctgaaaggtgaactcgttccagatgaaattggtaatcctgtagtaaaacgccgcctgaaggagaaagactgcgaaaaaggctttattttggatggtttcccgcgtaccgtgcgccaagcggaatatctggatagttttcttgaaagccagggccgccagttgacagccgccgtgctgattgaggtccccgaagatgaagttgttgcacgtctgctgtctcgccgtgtttgtccgaaatgcgggcgtagttacaacatgatttttctgccaccaaaagaagacgagctgtgtgacgattgcggtgtcagcttagtacagcgtttagatgataaggaagaaacggtccgtcaccgcctgaaagtctaccgtgagaagacccagccggtcattgactattatagtaagaaaggtattctcgcacgcgtagatgggagccaagaaatccggcctatcgtggcagaagtcctggggattctgggttggagcgataag

SEQ ID NO: 2676 - protein, 231 aa, synthetic construct
  REGION 1..231: note = variant of adenylate kinase from Thermotoga neapolitana
MHHHHHHGGSGMGAYLVLLGPPGAGKGTQGRIISAKTGIPHISTGDIFRDIVAKQNDEVASSIKEWMLKGELVPDEIGNPVVKRRLKEKDCEKGFILDGFPRTVRQAEYLDSFLESQGRQLTAAVLIEVPEDEVVARLLSRRVCPKCGRSYNMIFLPPKEDELCDDCGVSLVQRLDDKEETVRHRLKVYREKTQPVIDYYSKKGILARVDGSQEIRPIVAEVLGILGWSDK

SEQ ID NO: 2677 - DNA, 693 bp, synthetic construct
  misc_feature 1..693: note = variant of adenylate kinase from Thermotoga neapolitana
  source 1..693: mol_type = other DNA
atgcaccatcatcaccatcacgggggctccggcatgggggcatatctggtgttattaggtccgccgggcgcgggaaaaggtacccaaggccgtattatttcggcaaagactggcatcccgcatattagcacgggcgatatcctgcgtgacatcgtcgctaagcaaaacgatgaagttgcctcgagcattaaagagtggatgctgaaaggtgaactcgttccagatgaaattggtaatcctgtagtaaaacgccgcctgaaggagaaagactgcgaaaaaggctttattttggatggtttcccgcgtaccgtgcgccaagcggaatatctggatagttttcttgaaagccagggccgccagttgacagccgccgtgctgattgaggtccccgaagatgaagttgttgcacgtgtgctgtctcgccgtgtttgtccgaaatgcgggcgtagttacaacatgatttttctgccaccaaaagaagacgagctgtgtgacgattgcggtgtcagcttagtacagcgtttagatgataaggaagaaacggtccgtcaccgcctgaaagtctaccgtgagaagacccagccggtcattgactattatagtaagaaaggtattctcgcacgcgtagatgggagccaagaaatccggcctatcgtggcagaagtcctggggattctgggttggagcgataag

SEQ ID NO: 2678 - protein, 231 aa, synthetic construct
  REGION 1..231: note = variant of adenylate kinase from Thermotoga neapolitana
MHHHHHHGGSGMGAYLVLLGPPGAGKGTQGRIISAKTGIPHISTGDILRDIVAKQNDEVASSIKEWMLKGELVPDEIGNPVVKRRLKEKDCEKGFILDGFPRTVRQAEYLDSFLESQGRQLTAAVLIEVPEDEVVARVLSRRVCPKCGRSYNMIFLPPKEDELCDDCGVSLVQRLDDKEETVRHRLKVYREKTQPVIDYYSKKGILARVDGSQEIRPIVAEVLGILGWSDK

SEQ ID NO: 2679 - DNA, 693 bp, synthetic construct
  misc_feature 1..693: note = variant of adenylate kinase from Thermotoga neapolitana
  source 1..693: mol_type = other DNA
atgcaccatcatcaccatcacgggggctccggcatgggggcatatctggtgttattaggtgtgccgggcgcgggaaaaggtacccaaggccgtattatttcggcaaagactggcatcccgcatattagcacgggcgatatcctgcgtgacatcgtcgctaagcaaaacgatgaagttgcctcgagcattaaagagtggatgctgaaaggtgaactcgttccagatgaaattggtaatcctgtagtaaaacgccgcctgaaggagaaagactgcgaaaaaggctttattttggatggtttcccgcgtaccgtgcgccaagcggaatatctggatagttttcttgaaagccagggccgccagttgacagccgccgtgctgattgaggtccccgaagatgaagttgttgcacgtctgctgtctcgccgtgtttgtccgaaatgcgggcgtagttacaacatgatttttctgccaccaaaagaagacgagctgtgtgacgattgcggtgtcagcttagtacagcgtttagatgataaggaagaaacggtccgtcaccgcctgaaagtctaccgtgagaagacccagccggtcattgactattatagtaagaaaggtattctcgcacgcgtagatgggagccaagaaatccggcctatcgtggcagaagtcctggggattctgggttggagcgataag

SEQ ID NO: 2680 - protein, 231 aa, synthetic construct
  REGION 1..231: note = variant of adenylate kinase from Thermotoga neapolitana
MHHHHHHGGSGMGAYLVLLGVPGAGKGTQGRIISAKTGIPHISTGDILRDIVAKQNDEVASSIKEWMLKGELVPDEIGNPVVKRRLKEKDCEKGFILDGFPRTVRQAEYLDSFLESQGRQLTAAVLIEVPEDEVVARLLSRRVCPKCGRSYNMIFLPPKEDELCDDCGVSLVQRLDDKEETVRHRLKVYREKTQPVIDYYSKKGILARVDGSQEIRPIVAEVLGILGWSDK

SEQ ID NO: 2681 - DNA, 693 bp, synthetic construct
  misc_feature 1..693: note = variant of adenylate kinase from Thermotoga neapolitana
  source 1..693: mol_type = other DNA
atgcaccatcatcaccatcacgggggctccggcatgggggcatatctggtgttattaggtttgccgggcgcgggaaaaggtacccaaggccgtattatttcggcaaagactggcatcccgcatattagcacgggcgatatcctgcgtgacatcgtcgctaagcaaaacgatgaagttgcctcgagcattaaagagtggatgctgaaaggtgaactcgttccagatgaaattggtaatcctgtagtaaaacgccgcctgaaggagaaagactgcgaaaaaggctttattttggatggtttcccgcgtaccgtgcgccaagcggaatatctggatagttttcttgaaagccagggccgccagttgacagccgccgtgctgattgaggtccccgaagatgaagttgttgcacgtctgctgtctcgccgtgtttgtccgaaatgcgggcgtagttacaacatgatttttctgccaccaaaagaagacgagctgtgtgacgattgcggtgtcagcttagtacagcgtttagatgataaggaagaaacggtccgtcaccgcctgaaagtctaccgtgagaagacccagccggtcattgactattatagtaagaaaggtattctcgcacgcgtagatgggagccaagaaatccggcctatcgtggcagaagtcctggggattctgggttggagcgataag

SEQ ID NO: 2682 - protein, 231 aa, synthetic construct
  REGION 1..231: note = variant of adenylate kinase from Thermotoga neapolitana
MHHHHHHGGSGMGAYLVLLGLPGAGKGTQGRIISAKTGIPHISTGDILRDIVAKQNDEVASSIKEWMLKGELVPDEIGNPVVKRRLKEKDCEKGFILDGFPRTVRQAEYLDSFLESQGRQLTAAVLIEVPEDEVVARLLSRRVCPKCGRSYNMIFLPPKEDELCDDCGVSLVQRLDDKEETVRHRLKVYREKTQPVIDYYSKKGILARVDGSQEIRPIVAEVLGILGWSDK

SEQ ID NO: 2683 - DNA, 693 bp, synthetic construct
  misc_feature 1..693: note = variant of adenylate kinase from Thermotoga neapolitana
  source 1..693: mol_type = other DNA
atgcaccatcatcaccatcacgggggctccggcatgggggcatatctggtgttattaggtccgccgggcgcgggaaaaggtacccaaggccgtattatttcggcaaagactggcatcccgcatattgggacgggcgatatcctgcgtgacatcgtcgctaagcaaaacgatgaagttgcctcgagcattaaagagtggatgctgaaaggtgaactcgttccagatgaaattggtaatcctgtagtaaaacgccgcctgaaggagaaagactgcgaaaaaggctttattttggatggtttcccgcgtaccgtgcgccaagcggaatatctggatagttttcttgaaagccagggccgccagttgacagccgccgtgctgattgaggtccccgaagatgaagttgttgcacgtctgctgtctcgccgtgtttgtccgaaatgcgggcgtagttacaacatgatttttctgccaccaaaagaagacgagctgtgtgacgattgcggtgtcagcttagtacagcgtttagatgataaggaagaaacggtccgtcaccgcctgaaagtctaccgtgagaagacccagccggtcattgactattatagtaagaaaggtattctcgcacgcgtagatgggagccaagaaatccggcctatcgtggcagaagtcctggggattctgggttggagcgataag

SEQ ID NO: 2684 - protein, 231 aa, synthetic construct
  REGION 1..231: note = variant of adenylate kinase from Thermotoga neapolitana
MHHHHHHGGSGMGAYLVLLGPPGAGKGTQGRIISAKTGIPHIGTGDILRDIVAKQNDEVASSIKEWMLKGELVPDEIGNPVVKRRLKEKDCEKGFILDGFPRTVRQAEYLDSFLESQGRQLTAAVLIEVPEDEVVARLLSRRVCPKCGRSYNMIFLPPKEDELCDDCGVSLVQRLDDKEETVRHRLKVYREKTQPVIDYYSKKGILARVDGSQEIRPIVAEVLGILGWSDK

SEQ ID NO: 2685 - DNA, 693 bp, synthetic construct
  misc_feature 1..693: note = variant of adenylate kinase from Thermotoga neapolitana
  source 1..693: mol_type = other DNA
atgcaccatcatcaccatcacgggggctccggcatgggggcatatctggtgttattaggtccgccgggcgcgggaaaaggtacccaaggccgtattatttcggcaaagactggcatcccgcatattagcacgggcgagatcctgcgtgacatcgtcgctaagcaaaacgatgaagttgcctcgagcattaaagagtggatgctgaaaggtgaactcgttccagatgaaattggtaatcctgtagtaaaacgccgcctgaaggagaaagactgcgaaaaaggctttattttggatggtttcccgcgtaccgtgcgccaagcggaatatctggatagttttcttgaaagccagggccgccagttgacagccgccgtgctgattgaggtccccgaagatgaagttgttgcacgtctgctgtctcgccgtgtttgtccgaaatgcgggcgtagttacaacatgatttttctgccaccaaaagaagacgagctgtgtgacgattgcggtgtcagcttagtacagcgtttagatgataaggaagaaacggtccgtcaccgcctgaaagtctaccgtgagaagacccagccggtcattgactattatagtaagaaaggtattctcgcacgcgtagatgggagccaagaaatccggcctatcgtggcagaagtcctggggattctgggttggagcgataag

SEQ ID NO: 2686 - protein, 231 aa, synthetic construct
  REGION 1..231: note = variant of adenylate kinase from Thermotoga neapolitana
MHHHHHHGGSGMGAYLVLLGPPGAGKGTQGRIISAKTGIPHISTGEILRDIVAKQNDEVASSIKEWMLKGELVPDEIGNPVVKRRLKEKDCEKGFILDGFPRTVRQAEYLDSFLESQGRQLTAAVLIEVPEDEVVARLLSRRVCPKCGRSYNMIFLPPKEDELCDDCGVSLVQRLDDKEETVRHRLKVYREKTQPVIDYYSKKGILARVDGSQEIRPIVAEVLGILGWSDK

SEQ ID NO: 2687 - DNA, 693 bp, synthetic construct
  misc_feature 1..693: note = variant of adenylate kinase from Thermotoga neapolitana
  source 1..693: mol_type = other DNA
atgcaccatcatcaccatcacgggggctccggcatgggggcatatctggtgttattaggtccggctggcgcgggaaaaggtacccaaggccgtattatttcggcaaagactggcatcccgcatattagcacgggcgatatcctgcgtgacatcgtcgctaagcaaaacgatgaagttgcctcgagcattaaagagtggatgctgaaaggtgaactcgttccagatgaaattggtaatcctgtagtaaaacgccgcctgaaggagaaagactgcgaaaaaggctttattttggatggtttcccgcgtaccgtgcgccaagcggaatatctggatagttttcttgaaagccagggccgccagttgacagccgccgtgctgattgaggtccccgaagatgaagttgttgcacgtctgctgtctcgccgtgtttgtccgaaatgcgggcgtagttacaacatgatttttctgccaccaaaagaagacgagctgtgtgacgattgcggtgtcagcttagtacagcgtttagatgataaggaagaaacggtccgtcaccgcctgaaagtctaccgtgagaagacccagccggtcattgactattatagtaagaaaggtattctcgcacgcgtagatgggagccaagaaatccggcctatcgtggcagaagtcctggggattctgggttggagcgataag

SEQ ID NO: 2688 - protein, 231 aa, synthetic construct
  REGION 1..231: note = variant of adenylate kinase from Thermotoga neapolitana
MHHHHHHGGSGMGAYLVLLGPAGAGKGTQGRIISAKTGIPHISTGDILRDIVAKQNDEVASSIKEWMLKGELVPDEIGNPVVKRRLKEKDCEKGFILDGFPRTVRQAEYLDSFLESQGRQLTAAVLIEVPEDEVVARLLSRRVCPKCGRSYNMIFLPPKEDELCDDCGVSLVQRLDDKEETVRHRLKVYREKTQPVIDYYSKKGILARVDGSQEIRPIVAEVLGILGWSDK

SEQ ID NO: 2689 - DNA, 693 bp, synthetic construct
  misc_feature 1..693: note = variant of adenylate kinase from Thermotoga neapolitana
  source 1..693: mol_type = other DNA
atgcaccatcatcaccatcacgggggctccggcatgggggcatatctggtgttattaggtccgccgggcgcgggaaaaggtacccaaggccgtattatttcggcaaagactggcatcccgcatattagcacgggcgatatcctgcgtgacatcgtcgctaagcaaaacgatgaagttgcctcgagcattaaagagtggatgctgaaaggtgaactcgttccagatgaaattggtaatcctgtagtaaaacgccgcctgaaggagaaagactgcgaaaaaggctttattttggatggtttcccgcgtaccgtgcgccaagcggaatatctggatagttttcttgaaagccagggccgccagttgacagccgccgtgctgattgaggtccccgaagatgaagttgttgcacgtctgctgtctcgccgtgtttgtccgaaatgcgggcgtagttacaacatgatttttctgccaccaaaagaagacgagctgtgtgacgattgcggtgtcagcttagtacagcgtttagatgataaggaagaatgtgtccgtcaccgcctgaaagtctaccgtgagaagacccagccggtcattgactattatagtaagaaaggtattctcgcacgcgtagatgggagccaagaaatccggcctatcgtggcagaagtcctggggattctgggttggagcgataag

SEQ ID NO: 2690 - protein, 231 aa, synthetic construct
  REGION 1..231: note = variant of adenylate kinase from Thermotoga neapolitana
MHHHHHHGGSGMGAYLVLLGPPGAGKGTQGRIISAKTGIPHISTGDILRDIVAKQNDEVASSIKEWMLKGELVPDEIGNPVVKRRLKEKDCEKGFILDGFPRTVRQAEYLDSFLESQGRQLTAAVLIEVPEDEVVARLLSRRVCPKCGRSYNMIFLPPKEDELCDDCGVSLVQRLDDKEECVRHRLKVYREKTQPVIDYYSKKGILARVDGSQEIRPIVAEVLGILGWSDK

SEQ ID NO: 2691 - DNA, 693 bp, synthetic construct
  misc_feature 1..693: note = variant of adenylate kinase from Thermotoga neapolitana
  source 1..693: mol_type = other DNA
atgcaccatcatcaccatcacgggggctccggcatgggggcatatctggtgttattaggtccgccgggcgcgggaaaaggtacccaaggccgtattatttcggcaaagactggcatcccgcatattagcacgggcgatatcctgcgtgacatcgtcgctaagcaaaacgatgaagttgcctcgagcattaaagagtggatgctgaaaggtgaactcgttccagatgaaattggtaatcctgtagtaaaacgccgcctgaaggagaaagactgcgaaaaaggctttattttggatggtttcccgcgtaccgtgcgccaagcggaatatctggatagttttcttgaaagccagggccgccagttgacagccgccgtgctgattgaggtccccgaagatgaagttgttgcacgtctgctgtctcgccgtgtttgtccgaaatgcgggcgtagttacaacatgatttttctgccaccaaaagaagacgagctgtgtgacgattgcggtgtcagcttagtacagcgtttagatgataaggaagaaacggctcgtcaccgcctgaaagtctaccgtgagaagacccagccggtcattgactattatagtaagaaaggtattctcgcacgcgtagatgggagccaagaaatccggcctatcgtggcagaagtcctggggattctgggttggagcgataag

SEQ ID NO: 2692 - protein, 231 aa, synthetic construct
  REGION 1..231: note = variant of adenylate kinase from Thermotoga neapolitana
MHHHHHHGGSGMGAYLVLLGPPGAGKGTQGRIISAKTGIPHISTGDILRDIVAKQNDEVASSIKEWMLKGELVPDEIGNPVVKRRLKEKDCEKGFILDGFPRTVRQAEYLDSFLESQGRQLTAAVLIEVPEDEVVARLLSRRVCPKCGRSYNMIFLPPKEDELCDDCGVSLVQRLDDKEETARHRLKVYREKTQPVIDYYSKKGILARVDGSQEIRPIVAEVLGILGWSDK

SEQ ID NO: 2693 - DNA, 693 bp, synthetic construct
  misc_feature 1..693: note = variant of adenylate kinase from Thermotoga neapolitana
  source 1..693: mol_type = other DNA
atgcaccatcatcaccatcacgggggctccggcatgggggcatatctggtgttattaggtccgccgggcgcgggaaaaggtacccaaggccgtattatttcggcaaagactggcatcccgcatattagcacgggcgatatcctgcgtgacatcgtcgctaagcaaaacgatgaagttgcctcgagcattaaagagtggatgctgaaaggtgaactcgttccagatgaaattggtaatcctgtagtaaaacgccgcctgaaggagaaagactgcgaaaaaggctttattttggatggtttcccgcgtaccgtgcgccaagcggaatatctggatagttttcttgaaagccagggccgccagttgacagccgccgtgctgattgaggtccccgaagatgaagttgttgcacgtatgctgtctcgccgtgtttgtccgaaatgcgggcgtagttacaacatgatttttctgccaccaaaagaagacgagctgtgtgacgattgcggtgtcagcttagtacagcgtttagatgataaggaagaaacggtccgtcaccgcctgaaagtctaccgtgagaagacccagccggtcattgactattatagtaagaaaggtattctcgcacgcgtagatgggagccaagaaatccggcctatcgtggcagaagtcctggggattctgggttggagcgataag

SEQ ID NO: 2694 - protein, 231 aa, synthetic construct
  REGION 1..231: note = variant of adenylate kinase from Thermotoga neapolitana
MHHHHHHGGSGMGAYLVLLGPPGAGKGTQGRIISAKTGIPHISTGDILRDIVAKQNDEVASSIKEWMLKGELVPDEIGNPVVKRRLKEKDCEKGFILDGFPRTVRQAEYLDSFLESQGRQLTAAVLIEVPEDEVVARMLSRRVCPKCGRSYNMIFLPPKEDELCDDCGVSLVQRLDDKEETVRHRLKVYREKTQPVIDYYSKKGILARVDGSQEIRPIVAEVLGILGWSDK

SEQ ID NO: 2695 - DNA, 693 bp, synthetic construct
  misc_feature 1..693: note = variant of adenylate kinase from Thermotoga neapolitana
  source 1..693: mol_type = other DNA
atgcaccatcatcaccatcacgggggctccggcatgggggcatatctggtgttattaggtccgccgggcgcgggaaaaggtacccaaggccgtattatttcggcaaagactggcatcccgcatattagcagtggcgatatcctgcgtgacatcgtcgctaagcaaaacgatgaagttgcctcgagcattaaagagtggatgctgaaaggtgaactcgttccagatgaaattggtaatcctgtagtaaaacgccgcctgaaggagaaagactgcgaaaaaggctttattttggatggtttcccgcgtaccgtgcgccaagcggaatatctggatagttttcttgaaagccagggccgccagttgacagccgccgtgctgattgaggtccccgaagatgaagttgttgcacgtctgctgtctcgccgtgtttgtccgaaatgcgggcgtagttacaacatgatttttctgccaccaaaagaagacgagctgtgtgacgattgcggtgtcagcttagtacagcgtttagatgataaggaagaaacggtccgtcaccgcctgaaagtctaccgtgagaagacccagccggtcattgactattatagtaagaaaggtattctcgcacgcgtagatgggagccaagaaatccggcctatcgtggcagaagtcctggggattctgggttggagcgataag

SEQ ID NO: 2696 - protein, 231 aa, synthetic construct
  REGION 1..231: note = variant of adenylate kinase from Thermotoga neapolitana
MHHHHHHGGSGMGAYLVLLGPPGAGKGTQGRIISAKTGIPHISSGDILRDIVAKQNDEVASSIKEWMLKGELVPDEIGNPVVKRRLKEKDCEKGFILDGFPRTVRQAEYLDSFLESQGRQLTAAVLIEVPEDEVVARLLSRRVCPKCGRSYNMIFLPPKEDELCDDCGVSLVQRLDDKEETVRHRLKVYREKTQPVIDYYSKKGILARVDGSQEIRPIVAEVLGILGWSDK

SEQ ID NO: 2697 - DNA, 693 bp, synthetic construct
  misc_feature 1..693: note = variant of adenylate kinase from Thermotoga neapolitana
  source 1..693: mol_type = other DNA
atgcaccatcatcaccatcacgggggctccggcatgggggcatatctggtgttattaggtccgccgggcgcgggaaaaggtacccaaggccgtattatttcggcaaagactggcatcccgcatattagcacgggcgatatcctgcgtgacatcgtcgctaagcaaaacgatgaagttgcctcgagcattaaagagtggatgctgaaaggtgaactcgttccagatgaaattggtaatcctgtagtaaaacgccgcctgaaggagaaagactgcgaaaaaggctttattttggatggtttcccgcgtaccgtgcgccaagcggaatatctggatagttttcttgaaagccagggccgccagttgacagccgccgtgctgattgaggtccccgaagatgaagttgttgcacgtctgctgtctcgccgtgtttgtccgaaatgcgggcgtagttacaacatgatttttctgccaccaaaagaagacgagctgtgtgacgattgcggtgtcagcttagtacagcgtttagatgataaggaagaagtggtccgtcaccgcctgaaagtctaccgtgagaagacccagccggtcattgactattatagtaagaaaggtattctcgcacgcgtagatgggagccaagaaatccggcctatcgtggcagaagtcctggggattctgggttggagcgataag

SEQ ID NO: 2698 - protein, 231 aa, synthetic construct
  REGION 1..231: note = variant of adenylate kinase from Thermotoga neapolitana
MHHHHHHGGSGMGAYLVLLGPPGAGKGTQGRIISAKTGIPHISTGDILRDIVAKQNDEVASSIKEWMLKGELVPDEIGNPVVKRRLKEKDCEKGFILDGFPRTVRQAEYLDSFLESQGRQLTAAVLIEVPEDEVVARLLSRRVCPKCGRSYNMIFLPPKEDELCDDCGVSLVQRLDDKEEVVRHRLKVYREKTQPVIDYYSKKGILARVDGSQEIRPIVAEVLGILGWSDK

SEQ ID NO: 2699 - DNA, 693 bp, synthetic construct
  misc_feature 1..693: note = variant of adenylate kinase from Thermotoga neapolitana
  source 1..693: mol_type = other DNA
atgcaccatcatcaccatcacgggggctccggcatgggggcatatctggtgttattaggtccgccgggcgcgggaaaaggtacccaaggccgtattatttcggcaaagactggcatcccgcatattagcacgggcatgatcctgcgtgacatcgtcgctaagcaaaacgatgaagttgcctcgagcattaaagagtggatgctgaaaggtgaactcgttccagatgaaattggtaatcctgtagtaaaacgccgcctgaaggagaaagactgcgaaaaaggctttattttggatggtttcccgcgtaccgtgcgccaagcggaatatctggatagttttcttgaaagccagggccgccagttgacagccgccgtgctgattgaggtccccgaagatgaagttgttgcacgtctgctgtctcgccgtgtttgtccgaaatgcgggcgtagttacaacatgatttttctgccaccaaaagaagacgagctgtgtgacgattgcggtgtcagcttagtacagcgtttagatgataaggaagaaacggtccgtcaccgcctgaaagtctaccgtgagaagacccagccggtcattgactattatagtaagaaaggtattctcgcacgcgtagatgggagccaagaaatccggcctatcgtggcagaagtcctggggattctgggttggagcgataag

SEQ ID NO: 2700 - protein, 231 aa, synthetic construct
  REGION 1..231: note = variant of adenylate kinase from Thermotoga neapolitana
MHHHHHHGGSGMGAYLVLLGPPGAGKGTQGRIISAKTGIPHISTGMILRDIVAKQNDEVASSIKEWMLKGELVPDEIGNPVVKRRLKEKDCEKGFILDGFPRTVRQAEYLDSFLESQGRQLTAAVLIEVPEDEVVARLLSRRVCPKCGRSYNMIFLPPKEDELCDDCGVSLVQRLDDKEETVRHRLKVYREKTQPVIDYYSKKGILARVDGSQEIRPIVAEVLGILGWSDK

SEQ ID NO: 2701 - DNA, 693 bp, synthetic construct
  misc_feature 1..693: note = variant of adenylate kinase from Thermotoga neapolitana
  source 1..693: mol_type = other DNA
atgcaccatcatcaccatcacgggggctccggcatgggggcatatctggtgttattaggtccgccgggcgcgggaaaaggtacccaaggccgtattatttcggcaaagactggcatcccgcatattagcacgggcttgatcctgcgtgacatcgtcgctaagcaaaacgatgaagttgcctcgagcattaaagagtggatgctgaaaggtgaactcgttccagatgaaattggtaatcctgtagtaaaacgccgcctgaaggagaaagactgcgaaaaaggctttattttggatggtttcccgcgtaccgtgcgccaagcggaatatctggatagttttcttgaaagccagggccgccagttgacagccgccgtgctgattgaggtccccgaagatgaagttgttgcacgtctgctgtctcgccgtgtttgtccgaaatgcgggcgtagttacaacatgatttttctgccaccaaaagaagacgagctgtgtgacgattgcggtgtcagcttagtacagcgtttagatgataaggaagaaacggtccgtcaccgcctgaaagtctaccgtgagaagacccagccggtcattgactattatagtaagaaaggtattctcgcacgcgtagatgggagccaagaaatccggcctatcgtggcagaagtcctggggattctgggttggagcgataag

SEQ ID NO: 2702 - protein, 231 aa, synthetic construct
  REGION 1..231: note = variant of adenylate kinase from Thermotoga neapolitana
MHHHHHHGGSGMGAYLVLLGPPGAGKGTQGRIISAKTGIPHISTGLILRDIVAKQNDEVASSIKEWMLKGELVPDEIGNPVVKRRLKEKDCEKGFILDGFPRTVRQAEYLDSFLESQGRQLTAAVLIEVPEDEVVARLLSRRVCPKCGRSYNMIFLPPKEDELCDDCGVSLVQRLDDKEETVRHRLKVYREKTQPVIDYYSKKGILARVDGSQEIRPIVAEVLGILGWSDK

SEQ ID NO: 2703 - DNA, 693 bp, synthetic construct
  misc_feature 1..693: note = variant of adenylate kinase from Thermotoga neapolitana
  source 1..693: mol_type = other DNA
atgcaccatcatcaccatcacgggggctccggcatgggggcatatctggtgttattaggtaatccgggcgcgggaaaaggtacccaaggccgtattatttcggcaaagactggcatcccgcatattagcacgggcgatatcctgcgtgacatcgtcgctaagcaaaacgatgaagttgcctcgagcattaaagagtggatgctgaaaggtgaactcgttccagatgaaattggtaatcctgtagtaaaacgccgcctgaaggagaaagactgcgaaaaaggctttattttggatggtttcccgcgtaccgtgcgccaagcggaatatctggatagttttcttgaaagccagggccgccagttgacagccgccgtgctgattgaggtccccgaagatgaagttgttgcacgtctgctgtctcgccgtgtttgtccgaaatgcgggcgtagttacaacatgatttttctgccaccaaaagaagacgagctgtgtgacgattgcggtgtcagcttagtacagcgtttagatgataaggaagaaacggtccgtcaccgcctgaaagtctaccgtgagaagacccagccggtcattgactattatagtaagaaaggtattctcgcacgcgtagatgggagccaagaaatccggcctatcgtggcagaagtcctggggattctgggttggagcgataag

SEQ ID NO: 2704 - protein, 231 aa, synthetic construct
  REGION 1..231: note = variant of adenylate kinase from Thermotoga neapolitana
MHHHHHHGGSGMGAYLVLLGNPGAGKGTQGRIISAKTGIPHISTGDILRDIVAKQNDEVASSIKEWMLKGELVPDEIGNPVVKRRLKEKDCEKGFILDGFPRTVRQAEYLDSFLESQGRQLTAAVLIEVPEDEVVARLLSRRVCPKCGRSYNMIFLPPKEDELCDDCGVSLVQRLDDKEETVRHRLKVYREKTQPVIDYYSKKGILARVDGSQEIRPIVAEVLGILGWSDK

SEQ ID NO: 2705 - DNA, 693 bp, synthetic construct
  misc_feature 1..693: note = variant of adenylate kinase from Thermotoga neapolitana
  source 1..693: mol_type = other DNA
atgcaccatcatcaccatcacgggggctccggcatgggggcatatctggtgttattagctccgccgggcgcgggaaaaggtacccaaggccgtattatttcggcaaagactggcatcccgcatattagcacgggcgatatcctgcgtgacatcgtcgctaagcaaaacgatgaagttgcctcgagcattaaagagtggatgctgaaaggtgaactcgttccagatgaaattggtaatcctgtagtaaaacgccgcctgaaggagaaagactgcgaaaaaggctttattttggatggtttcccgcgtaccgtgcgccaagcggaatatctggatagttttcttgaaagccagggccgccagttgacagccgccgtgctgattgaggtccccgaagatgaagttgttgcacgtctgctgtctcgccgtgtttgtccgaaatgcgggcgtagttacaacatgatttttctgccaccaaaagaagacgagctgtgtgacgattgcggtgtcagcttagtacagcgtttagatgataaggaagaaacggtccgtcaccgcctgaaagtctaccgtgagaagacccagccggtcattgactattatagtaagaaaggtattctcgcacgcgtagatgggagccaagaaatccggcctatcgtggcagaagtcctggggattctgggttggagcgataag

SEQ ID NO: 2706 - protein, 231 aa, synthetic construct
  REGION 1..231: note = variant of adenylate kinase from Thermotoga neapolitana
MHHHHHHGGSGMGAYLVLLAPPGAGKGTQGRIISAKTGIPHISTGDILRDIVAKQNDEVASSIKEWMLKGELVPDEIGNPVVKRRLKEKDCEKGFILDGFPRTVRQAEYLDSFLESQGRQLTAAVLIEVPEDEVVARLLSRRVCPKCGRSYNMIFLPPKEDELCDDCGVSLVQRLDDKEETVRHRLKVYREKTQPVIDYYSKKGILARVDGSQEIRPIVAEVLGILGWSDK

SEQ ID NO: 2707 - DNA, 693 bp, synthetic construct
  misc_feature 1..693: note = variant of adenylate kinase from Thermotoga neapolitana
  source 1..693: mol_type = other DNA
atgcaccatcatcaccatcacgggggctccggcatgggggcatatctggtgttattaggtccgccgggcgcgggaaaaggtacccaaggccgtattatttcggcaaagactggcatcccgcatattgcgacgggcgatatcctgcgtgacatcgtcgctaagcaaaacgatgaagttgcctcgagcattaaagagtggatgctgaaaggtgaactcgttccagatgaaattggtaatcctgtagtaaaacgccgcctgaaggagaaagactgcgaaaaaggctttattttggatggtttcccgcgtaccgtgcgccaagcggaatatctggatagttttcttgaaagccagggccgccagttgacagccgccgtgctgattgaggtccccgaagatgaagttgttgcacgtctgctgtctcgccgtgtttgtccgaaatgcgggcgtagttacaacatgatttttctgccaccaaaagaagacgagctgtgtgacgattgcggtgtcagcttagtacagcgtttagatgataaggaagaaacggtccgtcaccgcctgaaagtctaccgtgagaagacccagccggtcattgactattatagtaagaaaggtattctcgcacgcgtagatgggagccaagaaatccggcctatcgtggcagaagtcctggggattctgggttggagcgataag

SEQ ID NO: 2708 - protein, 231 aa, synthetic construct
  REGION 1..231: note = variant of adenylate kinase from Thermotoga neapolitana
MHHHHHHGGSGMGAYLVLLGPPGAGKGTQGRIISAKTGIPHIATGDILRDIVAKQNDEVASSIKEWMLKGELVPDEIGNPVVKRRLKEKDCEKGFILDGFPRTVRQAEYLDSFLESQGRQLTAAVLIEVPEDEVVARLLSRRVCPKCGRSYNMIFLPPKEDELCDDCGVSLVQRLDDKEETVRHRLKVYREKTQPVIDYYSKKGILARVDGSQEIRPIVAEVLGILGWSDK

SEQ ID NO: 2709 - DNA, 693 bp, synthetic construct
  misc_feature 1..693: note = variant of adenylate kinase from Thermotoga neapolitana
  source 1..693: mol_type = other DNA
atgcaccatcatcaccatcacgggggctccggcatgggggcatatctggtgttattaggtccgccgggcgcgggaaaaggtacccaaggccgtattatttcggcaaagactggcatcccgcatattcatacgggcgatatcctgcgtgacatcgtcgctaagcaaaacgatgaagttgcctcgagcattaaagagtggatgctgaaaggtgaactcgttccagatgaaattggtaatcctgtagtaaaacgccgcctgaaggagaaagactgcgaaaaaggctttattttggatggtttcccgcgtaccgtgcgccaagcggaatatctggatagttttcttgaaagccagggccgccagttgacagccgccgtgctgattgaggtccccgaagatgaagttgttgcacgtctgctgtctcgccgtgtttgtccgaaatgcgggcgtagttacaacatgatttttctgccaccaaaagaagacgagctgtgtgacgattgcggtgtcagcttagtacagcgtttagatgataaggaagaaacggtccgtcaccgcctgaaagtctaccgtgagaagacccagccggtcattgactattatagtaagaaaggtattctcgcacgcgtagatgggagccaagaaatccggcctatcgtggcagaagtcctggggattctgggttggagcgataag

SEQ ID NO: 2710 - protein, 231 aa, synthetic construct
  REGION 1..231: note = variant of adenylate kinase from Thermotoga neapolitana
MHHHHHHGGSGMGAYLVLLGPPGAGKGTQGRIISAKTGIPHIHTGDILRDIVAKQNDEVASSIKEWMLKGELVPDEIGNPVVKRRLKEKDCEKGFILDGFPRTVRQAEYLDSFLESQGRQLTAAVLIEVPEDEVVARLLSRRVCPKCGRSYNMIFLPPKEDELCDDCGVSLVQRLDDKEETVRHRLKVYREKTQPVIDYYSKKGILARVDGSQEIRPIVAEVLGILGWSDK

SEQ ID NO: 2711 - DNA, 693 bp, synthetic construct
  misc_feature 1..693: note = variant of adenylate kinase from Thermotoga neapolitana
  source 1..693: mol_type = other DNA
atgcaccatcatcaccatcacgggggctccggcatgggggcatatctggtgttattaggtccgccgggcgcgggaaaaggtacccaaggccgtattatttcggcaaagactggcatcccgcatattagcacgggctatatcctgcgtgacatcgtcgctaagcaaaacgatgaagttgcctcgagcattaaagagtggatgctgaaaggtgaactcgttccagatgaaattggtaatcctgtagtaaaacgccgcctgaaggagaaagactgcgaaaaaggctttattttggatggtttcccgcgtaccgtgcgccaagcggaatatctggatagttttcttgaaagccagggccgccagttgacagccgccgtgctgattgaggtccccgaagatgaagttgttgcacgtctgctgtctcgccgtgtttgtccgaaatgcgggcgtagttacaacatgatttttctgccaccaaaagaagacgagctgtgtgacgattgcggtgtcagcttagtacagcgtttagatgataaggaagaaacggtccgtcaccgcctgaaagtctaccgtgagaagacccagccggtcattgactattatagtaagaaaggtattctcgcacgcgtagatgggagccaagaaatccggcctatcgtggcagaagtcctggggattctgggttggagcgataag

SEQ ID NO: 2712 - protein, 231 aa, synthetic construct
  REGION 1..231: note = variant of adenylate kinase from Thermotoga neapolitana
MHHHHHHGGSGMGAYLVLLGPPGAGKGTQGRIISAKTGIPHISTGYILRDIVAKQNDEVASSIKEWMLKGELVPDEIGNPVVKRRLKEKDCEKGFILDGFPRTVRQAEYLDSFLESQGRQLTAAVLIEVPEDEVVARLLSRRVCPKCGRSYNMIFLPPKEDELCDDCGVSLVQRLDDKEETVRHRLKVYREKTQPVIDYYSKKGILARVDGSQEIRPIVAEVLGILGWSDK

SEQ ID NO: 2713 - DNA, 693 bp, synthetic construct
  misc_feature 1..693: note = variant of adenylate kinase from Thermotoga neapolitana
  source 1..693: mol_type = other DNA
atgcaccatcatcaccatcacgggggctccggcatgggggcatatctggtgttattaggtccgccgggcgcgggaaaaggtacccaaggccgtattatttcggcaaagactggcatcccgcatattagcacgggctttatcctgcgtgacatcgtcgctaagcaaaacgatgaagttgcctcgagcattaaagagtggatgctgaaaggtgaactcgttccagatgaaattggtaatcctgtagtaaaacgccgcctgaaggagaaagactgcgaaaaaggctttattttggatggtttcccgcgtaccgtgcgccaagcggaatatctggatagttttcttgaaagccagggccgccagttgacagccgccgtgctgattgaggtccccgaagatgaagttgttgcacgtctgctgtctcgccgtgtttgtccgaaatgcgggcgtagttacaacatgatttttctgccaccaaaagaagacgagctgtgtgacgattgcggtgtcagcttagtacagcgtttagatgataaggaagaaacggtccgtcaccgcctgaaagtctaccgtgagaagacccagccggtcattgactattatagtaagaaaggtattctcgcacgcgtagatgggagccaagaaatccggcctatcgtggcagaagtcctggggattctgggttggagcgataag

SEQ ID NO: 2714 - protein, 231 aa, synthetic construct
  REGION 1..231: note = variant of adenylate kinase from Thermotoga neapolitana
MHHHHHHGGSGMGAYLVLLGPPGAGKGTQGRIISAKTGIPHISTGFILRDIVAKQNDEVASSIKEWMLKGELVPDEIGNPVVKRRLKEKDCEKGFILDGFPRTVRQAEYLDSFLESQGRQLTAAVLIEVPEDEVVARLLSRRVCPKCGRSYNMIFLPPKEDELCDDCGVSLVQRLDDKEETVRHRLKVYREKTQPVIDYYSKKGILARVDGSQEIRPIVAEVLGILGWSDK

SEQ ID NO: 2715 - DNA, 693 bp, synthetic construct
  misc_feature 1..693: note = variant of adenylate kinase from Thermotoga neapolitana
  source 1..693: mol_type = other DNA
atgcaccatcatcaccatcacgggggctccggcatgggggcatatctggtgttattaggtccgccgggcgcgggaaaaggtacccaaggccgtattatttcggcaaagactggcatcccgcatattagcacgggcgatatcctgcgtcagatcgtcgctaagcaaaacgatgaagttgcctcgagcattaaagagtggatgctgaaaggtgaactcgttccagatgaaattggtaatcctgtagtaaaacgccgcctgaaggagaaagactgcgaaaaaggctttattttggatggtttcccgcgtaccgtgcgccaagcggaatatctggatagttttcttgaaagccagggccgccagttgacagccgccgtgctgattgaggtccccgaagatgaagttgttgcacgtctgctgtctcgccgtgtttgtccgaaatgcgggcgtagttacaacatgatttttctgccaccaaaagaagacgagctgtgtgacgattgcggtgtcagcttagtacagcgtttagatgataaggaagaaacggtccgtatgcgcctgaaagtctaccgtgagaagacccagccggtcattgactattatagtaagaaaggtattctcgcacgcgtagatgggagccaagaaatccctcctatcgtggcagaagtcctggggattctgggttggagcgataag

SEQ ID NO: 2716 - protein, 231 aa, synthetic construct
  REGION 1..231: note = variant of adenylate kinase from Thermotoga neapolitana
MHHHHHHGGSGMGAYLVLLGPPGAGKGTQGRIISAKTGIPHISTGDILRQIVAKQNDEVASSIKEWMLKGELVPDEIGNPVVKRRLKEKDCEKGFILDGFPRTVRQAEYLDSFLESQGRQLTAAVLIEVPEDEVVARLLSRRVCPKCGRSYNMIFLPPKEDELCDDCGVSLVQRLDDKEETVRMRLKVYREKTQPVIDYYSKKGILARVDGSQEIPPIVAEVLGILGWSDK

SEQ ID NO: 2717 - DNA, 693 bp, synthetic construct
  misc_feature 1..693: note = variant of adenylate kinase from Thermotoga neapolitana
  source 1..693: mol_type = other DNA
atgcaccatcatcaccatcacgggggctccggcatgggggcatatctggtgttattaggtccgccgggcgcgggaaaaggtacccaaggccgtattatttcggcaaagactggcatcccgcatattagcacgggcgatatcctgcgtcgtatcgtcgctaagcaaaacgatgaagttgcctcgagcattaaagagtggatgctgaaaggtgaactcgttccagatgaaattggtaatcctgtagtaaaacgccgcctgaaggagaaagactgcgaaaaaggctttattttggatggtttcccgcgtaccgtgcgccaagcggaatatctggatagttttcttgaaagccagggccgccagttgacagccgccgtgctgattgaggtccccgaagatgaagttgttgcacgtctgctgtctcgccgtgtttgtccgaaatgcgggcgtagttacaacatgatttttctgccaccaaaagaagacgagctgtgtgacgattgcggtgtcagcttagtacagcgtttagatgataaggaagaaacggtccgtatgcgcctgaaagtctaccgtgagaagacccagccggtcattgactattatagtaagaaaggtattctcgcacgcgtagatgggagccaagaaatcatgcctatcgtggcagaagtcctggggattctgggttggagcgataag

SEQ ID NO: 2718 - protein, 231 aa, synthetic construct
  REGION 1..231: note = variant of adenylate kinase from Thermotoga neapolitana
MHHHHHHGGSGMGAYLVLLGPPGAGKGTQGRIISAKTGIPHISTGDILRRIVAKQNDEVASSIKEWMLKGELVPDEIGNPVVKRRLKEKDCEKGFILDGFPRTVRQAEYLDSFLESQGRQLTAAVLIEVPEDEVVARLLSRRVCPKCGRSYNMIFLPPKEDELCDDCGVSLVQRLDDKEETVRMRLKVYREKTQPVIDYYSKKGILARVDGSQEIMPIVAEVLGILGWSDK

SEQ ID NO: 2719 - DNA, 693 bp, synthetic construct
  misc_feature 1..693: note = variant of adenylate kinase from Thermotoga neapolitana
  source 1..693: mol_type = other DNA
atgcaccatcatcaccatcacgggggctccggcatgggggcatatctggtgttattaggtacgccgggcgcgggaaaaggtacccaaggccgtattatttcggcaaagactggcatcccgcatattagcacgggcgatatcctgcgtcagatcgtcgctaagcaaaacgatgaagttgcctcgagcattaaagagtggatgctgaaaggtgaactcgttccagatgaaattggtaatcctgtagtaaaacgccgcctgaaggagaaagactgcgaaaaaggctttattttggatggtttcccgcgtaccgtgcgccaagcggaatatctggatagttttcttgaaagccagggccgccagttgacagccgccgtgctgattgaggtccccgaagatgaagttgttgcacgtctgctgtctcgccgtgtttgtccgaaatgcgggcgtagttacaacatgatttttctgccaccaaaagaagacgagctgtgtgacgattgcggtgtcagcttagtacagcgtttagatgataaggaagaaacggtccgtatgcgcctgaaagtctaccgtgagaagacccagccggtcattgactattatagtaagaaaggtattctcgcacgcgtagatgggagccaagaaatcatgcctatcgtggcagaagtcctggggattctgggttggagcgataag

SEQ ID NO: 2720 - protein, 231 aa, synthetic construct
  REGION 1..231: note = variant of adenylate kinase from Thermotoga neapolitana
MHHHHHHGGSGMGAYLVLLGTPGAGKGTQGRIISAKTGIPHISTGDILRQIVAKQNDEVASSIKEWMLKGELVPDEIGNPVVKRRLKEKDCEKGFILDGFPRTVRQAEYLDSFLESQGRQLTAAVLIEVPEDEVVARLLSRRVCPKCGRSYNMIFLPPKEDELCDDCGVSLVQRLDDKEETVRMRLKVYREKTQPVIDYYSKKGILARVDGSQEIMPIVAEVLGILGWSDK

SEQ ID NO: 2721 - DNA, 693 bp, synthetic construct
  misc_feature 1..693: note = variant of adenylate kinase from Thermotoga neapolitana
  source 1..693: mol_type = other DNA
atgcaccatcatcaccatcacgggggctccggcatgggggcatatctggtgttattaggtccgccgggcgcgggaaaaggtacccaaggccgtattatttcggcaaagactggcatcccgcatattagcacgggcgatatcctgcgtcagatcgtcgctaagcaaaacgatgaagttgcctcgagcattaaagagtggatgctgaaaggtgaactcgttccagatgaaattggtaatcctgtagtaaaacgccgcctgaaggagaaagactgcgaaaaaggctttattttggatggtttcccgcgtaccgtgcgccaagcggaatatctggatagttttcttgaaagccagggccgccagttgacagccgccgtgctgattgaggtccccgaagatgaagttgttgcacgtctgctgtctcgccgtgtttgtccgaaatgcgggcgtagttacaacatgatttttctgccaccaaaagaagacgagctgtgtgacgattgcggtgtcagcttagtatttcgtttagatgataaggaagaaacggtccgtatgcgcctgaaagtctaccgtgagaagacccagccggtcattgactattatagtaagaaaggtattctcgcacgcgtagatgggagccaagaaatcatgcctatcgtggcagaagtcctggggattctgggttggagcgataag

SEQ ID NO: 2722 - protein, 231 aa, synthetic construct
  REGION 1..231: note = variant of adenylate kinase from Thermotoga neapolitana
MHHHHHHGGSGMGAYLVLLGPPGAGKGTQGRIISAKTGIPHISTGDILRQIVAKQNDEVASSIKEWMLKGELVPDEIGNPVVKRRLKEKDCEKGFILDGFPRTVRQAEYLDSFLESQGRQLTAAVLIEVPEDEVVARLLSRRVCPKCGRSYNMIFLPPKEDELCDDCGVSLVFRLDDKEETVRMRLKVYREKTQPVIDYYSKKGILARVDGSQEIMPIVAEVLGILGWSDK

SEQ ID NO: 2723 - DNA, 693 bp, synthetic construct
  misc_feature 1..693: note = variant of adenylate kinase from Thermotoga neapolitana
  source 1..693: mol_type = other DNA
atgcaccatcatcaccatcacgggggctccggcatgggggcatatctggtgttattaaggccgccgggcgcgggaaaaggtacccaaggccgtattatttcggcaaagactggcatcccgcatattagcacgggcgatatcctgcgtcagatcgtcgctaagcaaaacgatgaagttgcctcgagcattaaagagtggatgctgaaaggtgaactcgttccagatgaaattggtaatcctgtagtaaaacgccgcctgaaggagaaagactgcgaaaaaggctttattttggatggtttcccgcgtaccgtgcgccaagcggaatatctggatagttttcttgaaagccagggccgccagttgacagccgccgtgctgattgaggtccccgaagatgaagttgttgcacgtctgctgtctcgccgtgtttgtccgaaatgcgggcgtagttacaacatgatttttctgccaccaaaagaagacgagctgtgtgacgattgcggtgtcagcttagtacagcgtttagatgataaggaagaaacggtccgtatgcgcctgaaagtctaccgtgagaagacccagccggtcattgactattatagtaagaaaggtattctcgcacgcgtagatgggagccaagaaatcatgcctatcgtggcagaagtcctggggattctgggttggagcgataag

SEQ ID NO: 2724 - protein, 231 aa, synthetic construct
  REGION 1..231: note = variant of adenylate kinase from Thermotoga neapolitana
MHHHHHHGGSGMGAYLVLLRPPGAGKGTQGRIISAKTGIPHISTGDILRQIVAKQNDEVASSIKEWMLKGELVPDEIGNPVVKRRLKEKDCEKGFILDGFPRTVRQAEYLDSFLESQGRQLTAAVLIEVPEDEVVARLLSRRVCPKCGRSYNMIFLPPKEDELCDDCGVSLVQRLDDKEETVRMRLKVYREKTQPVIDYYSKKGILARVDGSQEIMPIVAEVLGILGWSDK

SEQ ID NO: 2725 - DNA, 693 bp, synthetic construct
  misc_feature 1..693: note = variant of adenylate kinase from Thermotoga neapolitana
  source 1..693: mol_type = other DNA
atgcaccatcatcaccatcacgggggctccggcatgggggcatatctggtgttattaggtccgccgggcgcgggaaaaggtacccaaggccgtattatttcggcaaagactggcatcccgcatattagcacgggcgatatcctgcgtcagatcgtcgctaagcaaaacgatgaagttgcctcgagcattaaagagtggatgctgaaaggtgaactcgttccagatgaaattggtaatcctgtagtaaaacgccgcctgaaggagaaagactgcgaaaaaggctttattttggatggtttcccgcgtaccgtgcgccaagcggaatatctggatagttttcttgaaagccagggccgccagttgacagccgccgtgctgattgaggtccccgaagatgaagttgttgcacgtctgctgtctcgccgtgtttgtccgaaatgcgggcgtagttacaacatgatttttgcgccaccaaaagaagacgagctgtgtgacgattgcggtgtcagcttagtacagcgtttagatgataaggaagaaacggtccgtatgcgcctgaaagtctaccgtgagaagacccagccggtcattgactattatagtaagaaaggtattctcgcacgcgtagatgggagccaagaaatcatgcctatcgtggcagaagtcctggggattctgggttggagcgataag

SEQ ID NO: 2726 - protein, 231 aa, synthetic construct
  REGION 1..231: note = variant of adenylate kinase from Thermotoga neapolitana
MHHHHHHGGSGMGAYLVLLGPPGAGKGTQGRIISAKTGIPHISTGDILRQIVAKQNDEVASSIKEWMLKGELVPDEIGNPVVKRRLKEKDCEKGFILDGFPRTVRQAEYLDSFLESQGRQLTAAVLIEVPEDEVVARLLSRRVCPKCGRSYNMIFAPPKEDELCDDCGVSLVQRLDDKEETVRMRLKVYREKTQPVIDYYSKKGILARVDGSQEIMPIVAEVLGILGWSDK

SEQ ID NO: 2727 - DNA, 693 bp, synthetic construct
  misc_feature 1..693: note = variant of adenylate kinase from Thermotoga neapolitana
  source 1..693: mol_type = other DNA
atgcaccatcatcaccatcacgggggctccggcatgggggcatatctggtgttattaggtccgccgggcgcgggaaaaggtacccaaggccgtattatttcggcaaagactggcatcccgcatattagcacgggcgatatcctgcgtcagatcgtcgctaagcaaaacgatgaagttgcctcgagcattaaagagtggatgctgaaaggtgaactcgttccagatgaaattggtaatcctgtagtaaaacgccgcctgaaggagaaagactgcgaaaaaggctttattttggatggtttcccgcgtaccgtgcgccaagcggaatatctggatagttttcttgaaagccagggccgccagttgacagccgccgtgctgattgaggtccccgaagatgaagttgttgcacgtctgctgtctcgccgtgtttgtccgaaatgcgggcgtagttacaacatgatttttctgccaccaaaagaagacgagctgtgtgacgattgcggtgtcagcttagtacagcgtttagatgataaggaagaaacggtccgtatgcgcctgaaagtctaccgtgagaagacccagccggtcattgactattatagtaagaaaggtattctcgcacgcgtagatgggagccaagaaatcctgcctatcgtggcagaagtcctggggattctgggttggagcgataag

SEQ ID NO: 2728 - protein, 231 aa, synthetic construct
  REGION 1..231: note = variant of adenylate kinase from Thermotoga neapolitana
MHHHHHHGGSGMGAYLVLLGPPGAGKGTQGRIISAKTGIPHISTGDILRQIVAKQNDEVASSIKEWMLKGELVPDEIGNPVVKRRLKEKDCEKGFILDGFPRTVRQAEYLDSFLESQGRQLTAAVLIEVPEDEVVARLLSRRVCPKCGRSYNMIFLPPKEDELCDDCGVSLVQRLDDKEETVRMRLKVYREKTQPVIDYYSKKGILARVDGSQEILPIVAEVLGILGWSDK

SEQ ID NO: 2729 - DNA, 693 bp, synthetic construct
  misc_feature 1..693: note = variant of adenylate kinase from Thermotoga neapolitana
  source 1..693: mol_type = other DNA
atgcaccatcatcaccatcacgggggctccggcatgggggcatatctggtgttattaggtccgccgggcgcgggaaaaggtacccaaggccgtattatttcggcaaagactggcatcccgcatattagcacgggcgatatcctgcgtcagatcgtcgctaagcaaaacgatgaagttgcctcgagcattaaagagtggatgctgtttggtgaactcgttccagatgaaattggtaatcctgtagtaaaacgccgcctgaaggagaaagactgcgaaaaaggctttattttggatggtttcccgcgtaccgtgcgccaagcggaatatctggatagttttcttgaaagccagggccgccagttgacagccgccgtgctgattgaggtccccgaagatgaagttgttgcacgtctgctgtctcgccgtgtttgtccgaaatgcgggcgtagttacaacatgatttttctgccaccaaaagaagacgagctgtgtgacgattgcggtgtcagcttagtacagcgtttagatgataaggaagaaacggtccgtatgcgcctgaaagtctaccgtgagaagacccagccggtcattgactattatagtaagaaaggtattctcgcacgcgtagatgggagccaagaaatcatgcctatcgtggcagaagtcctggggattctgggttggagcgataag

SEQ ID NO: 2730 - protein, 231 aa, synthetic construct
  REGION 1..231: note = variant of adenylate kinase from Thermotoga neapolitana
MHHHHHHGGSGMGAYLVLLGPPGAGKGTQGRIISAKTGIPHISTGDILRQIVAKQNDEVASSIKEWMLFGELVPDEIGNPVVKRRLKEKDCEKGFILDGFPRTVRQAEYLDSFLESQGRQLTAAVLIEVPEDEVVARLLSRRVCPKCGRSYNMIFLPPKEDELCDDCGVSLVQRLDDKEETVRMRLKVYREKTQPVIDYYSKKGILARVDGSQEIMPIVAEVLGILGWSDK

SEQ ID NO: 2731 - DNA, 693 bp, synthetic construct
  misc_feature 1..693: note = variant of adenylate kinase from Thermotoga neapolitana
  source 1..693: mol_type = other DNA
atgcaccatcatcaccatcacgggggctccggcatgggggcatatctggtgttattaggtccgccgggcgcgggaaaaggtacccaaggccgtattatttcggcaaagactggcatcccgcatattaatacgggcgatatcctgcgtcagatcgtcgctaagcaaaacgatgaagttgcctcgagcattaaagagtggatgctgaaaggtgaactcgttccagatgaaattggtaatcctgtagtaaaacgccgcctgaaggagaaagactgcgaaaaaggctttattttggatggtttcccgcgtaccgtgcgccaagcggaatatctggatagttttcttgaaagccagggccgccagttgacagccgccgtgctgattgaggtccccgaagatgaagttgttgcacgtctgctgtctcgccgtgtttgtccgaaatgcgggcgtagttacaacatgatttttctgccaccaaaagaagacgagctgtgtgacgattgcggtgtcagcttagtacagcgtttagatgataaggaagaaacggtccgtatgcgcctgaaagtctaccgtgagaagacccagccggtcattgactattatagtaagaaaggtattctcgcacgcgtagatgggagccaagaaatcatgcctatcgtggcagaagtcctggggattctgggttggagcgataag

SEQ ID NO: 2732 - protein, 231 aa, synthetic construct
  REGION 1..231: note = variant of adenylate kinase from Thermotoga neapolitana
MHHHHHHGGSGMGAYLVLLGPPGAGKGTQGRIISAKTGIPHINTGDILRQIVAKQNDEVASSIKEWMLKGELVPDEIGNPVVKRRLKEKDCEKGFILDGFPRTVRQAEYLDSFLESQGRQLTAAVLIEVPEDEVVARLLSRRVCPKCGRSYNMIFLPPKEDELCDDCGVSLVQRLDDKEETVRMRLKVYREKTQPVIDYYSKKGILARVDGSQEIMPIVAEVLGILGWSDK

SEQ ID NO: 2733 - DNA, 693 bp, synthetic construct
  misc_feature 1..693: note = variant of adenylate kinase from Thermotoga neapolitana
  source 1..693: mol_type = other DNA
atgcaccatcatcaccatcacgggggctccggcatgggggcatatctggtgttattaggtccgccgggcgcgggaaaaggtacccaaggccgtattatttcggcaaagactggcatcccgcatattagcacgggcgatatcctgcgtcagatcgtcgctaagcaaaacgatgaagttgcctcgagcattaaagagtggatgctgaaaggtgaactcgttccagatgaaattggtaatcctgtagtaaaacgccgcctgaaggagaaagactgcgaaaaaggctttattttggatggtttcccgcgtaccgtgcgccaagcggaatatctggatagttttcttgaaagccagggccgccagttgacagccgccgtgctgattgaggtccccgaagatgaagttgttgcacgtctgctgtctcgccgtgtttgtccgaaatgcccgcgtagttacaacatgatttttctgccaccaaaagaagacgagctgtgtgacgattgcggtgtcagcttagtacagcgtttagatgataaggaagaaacggtccgtatgcgcctgaaagtctaccgtgagaagacccagccggtcattgactattatagtaagaaaggtattctcgcacgcgtagatgggagccaagaaatcatgcctatcgtggcagaagtcctggggattctgggttggagcgataag

SEQ ID NO: 2734 - protein, 231 aa, synthetic construct
  REGION 1..231: note = variant of adenylate kinase from Thermotoga neapolitana
MHHHHHHGGSGMGAYLVLLGPPGAGKGTQGRIISAKTGIPHISTGDILRQIVAKQNDEVASSIKEWMLKGELVPDEIGNPVVKRRLKEKDCEKGFILDGFPRTVRQAEYLDSFLESQGRQLTAAVLIEVPEDEVVARLLSRRVCPKCPRSYNMIFLPPKEDELCDDCGVSLVQRLDDKEETVRMRLKVYREKTQPVIDYYSKKGILARVDGSQEIMPIVAEVLGILGWSDK

SEQ ID NO: 2735 - DNA, 693 bp, synthetic construct
  misc_feature 1..693: note = variant of adenylate kinase from Thermotoga neapolitana
  source 1..693: mol_type = other DNA
atgcaccatcatcaccatcacgggggctccggcatgggggcatatctggtgttattaggtccgccgggcgcgggaaaaggtacccaacttcgtattatttcggcaaagactggcatcccgcatattagcacgggcgatatcctgcgtcagatcgtcgctaagcaaaacgatgaagttgcctcgagcattaaagagtggatgctgaaaggtgaactcgttccagatgaaattggtaatcctgtagtaaaacgccgcctgaaggagaaagactgcgaaaaaggctttattttggatggtttcccgcgtaccgtgcgccaagcggaatatctggatagttttcttgaaagccagggccgccagttgacagccgccgtgctgattgaggtccccgaagatgaagttgttgcacgtctgctgtctcgccgtgtttgtccgaaatgcgggcgtagttacaacatgatttttctgccaccaaaagaagacgagctgtgtgacgattgcggtgtcagcttagtacagcgtttagatgataaggaagaaacggtccgtatgcgcctgaaagtctaccgtgagaagacccagccggtcattgactattatagtaagaaaggtattctcgcacgcgtagatgggagccaagaaatcatgcctatcgtggcagaagtcctggggattctgggttggagcgataag

SEQ ID NO: 2736 - protein, 231 aa, synthetic construct
  REGION 1..231: note = variant of adenylate kinase from Thermotoga neapolitana
MHHHHHHGGSGMGAYLVLLGPPGAGKGTQLRIISAKTGIPHISTGDILRQIVAKQNDEVASSIKEWMLKGELVPDEIGNPVVKRRLKEKDCEKGFILDGFPRTVRQAEYLDSFLESQGRQLTAAVLIEVPEDEVVARLLSRRVCPKCGRSYNMIFLPPKEDELCDDCGVSLVQRLDDKEETVRMRLKVYREKTQPVIDYYSKKGILARVDGSQEIMPIVAEVLGILGWSDK

SEQ ID NO: 2737 - DNA, 693 bp, synthetic construct
  misc_feature 1..693: note = variant of adenylate kinase from Thermotoga neapolitana
  source 1..693: mol_type = other DNA
atgcaccatcatcaccatcacgggggctccggcatgggggcatatctggtgttattaggtccgccgggcgcgggaaaaggtacccaaggccgtattatttcggcaaagactggcatcccgcatattagcacgggcgatatcctgcgtcagatcgtcgctaagcaaaacgatgaagttgcctcgagcattaaagagtggatgctgaaaggtgaactcgttccagatgaaattggtaatcctgtagtaaaacgccgcctgaaggagaaagactgcgaaaaaggctttattttggatggtttcccgcgtaccgtgcgccaagcggaatatctggatagttttcttgaaagccagggccgccagttgacagccgccgtgctgattgaggtccccgaagatgaagttgttgcacgtctgctgtctcgccgtgtttgtccgaaatgcgggctgagttacaacatgatttttctgccaccaaaagaagacgagctgtgtgacgattgcggtgtcagcttagtacagcgtttagatgataaggaagaaacggtccgtatgcgcctgaaagtctaccgtgagaagacccagccggtcattgactattatagtaagaaaggtattctcgcacgcgtagatgggagccaagaaatcatgcctatcgtggcagaagtcctggggattctgggttggagcgataag

SEQ ID NO: 2738 - protein, 231 aa, synthetic construct
  REGION 1..231: note = variant of adenylate kinase from Thermotoga neapolitana
MHHHHHHGGSGMGAYLVLLGPPGAGKGTQGRIISAKTGIPHISTGDILRQIVAKQNDEVASSIKEWMLKGELVPDEIGNPVVKRRLKEKDCEKGFILDGFPRTVRQAEYLDSFLESQGRQLTAAVLIEVPEDEVVARLLSRRVCPKCGLSYNMIFLPPKEDELCDDCGVSLVQRLDDKEETVRMRLKVYREKTQPVIDYYSKKGILARVDGSQEIMPIVAEVLGILGWSDK

SEQ ID NO: 2739 - DNA, 693 bp, synthetic construct
  misc_feature 1..693: note = variant of adenylate kinase from Thermotoga neapolitana
  source 1..693: mol_type = other DNA
atgcaccatcatcaccatcacgggggctccggcatgggggcatatctggtgttattaggtaggccgggcgcgggaaaaggtacccaaggccgtattatttcggcaaagactggcatcccgcatattagcacgggcgatatcctgcgtcagatcgtcgctaagcaaaacgatgaagttgcctcgagcattaaagagtggatgctgaaaggtgaactcgttccagatgaaattggtaatcctgtagtaaaacgccgcctgaaggagaaagactgcgaaaaaggctttattttggatggtttcccgcgtaccgtgcgccaagcggaatatctggatagttttcttgaaagccagggccgccagttgacagccgccgtgctgattgaggtccccgaagatgaagttgttgcacgtctgctgtctcgccgtgtttgtccgaaatgcgggcgtagttacaacatgatttttctgccaccaaaagaagacgagctgtgtgacgattgcggtgtcagcttagtacagcgtttagatgataaggaagaaacggtccgtatgcgcctgaaagtctaccgtgagaagacccagccggtcattgactattatagtaagaaaggtattctcgcacgcgtagatgggagccaagaaatcatgcctatcgtggcagaagtcctggggattctgggttggagcgataag

SEQ ID NO: 2740 - protein, 231 aa, synthetic construct
  REGION 1..231: note = variant of adenylate kinase from Thermotoga neapolitana
MHHHHHHGGSGMGAYLVLLGRPGAGKGTQGRIISAKTGIPHISTGDILRQIVAKQNDEVASSIKEWMLKGELVPDEIGNPVVKRRLKEKDCEKGFILDGFPRTVRQAEYLDSFLESQGRQLTAAVLIEVPEDEVVARLLSRRVCPKCGRSYNMIFLPPKEDELCDDCGVSLVQRLDDKEETVRMRLKVYREKTQPVIDYYSKKGILARVDGSQEIMPIVAEVLGILGWSDK

SEQ ID NO: 2741 - DNA, 693 bp, synthetic construct
  misc_feature 1..693: note = variant of adenylate kinase from Thermotoga neapolitana
  source 1..693: mol_type = other DNA
atgcaccatcatcaccatcacgggggctccggcatgggggcatatctggtgttattaggtccgccgggcgcgggaaaaggtacccaaggccgtattatttcggcaaagactggcatcccgcatattagcacgggcgatatcctgcgtcagatcgtcgctaagcaaaacgatgaagttgcctcgagcattaaagagtggatgctgaaaggtgaactcgttccagatgaaattggtaatcctgtagtaaaacgccgcctgaaggagaaagactgcgaaaaaggctttattttggatggtttcccgcgtaccgtgcgccaagcggaatatctggatagttttcttgaaagccagggccgccagttgacagccgccgtgctgattgaggtccccgaagatgaagttgttgcacgtctgctgtctcgccgtacttgtccgaaatgcgggcgtagttacaacatgatttttctgccaccaaaagaagacgagctgtgtgacgattgcggtgtcagcttagtacagcgtttagatgataaggaagaaacggtccgtatgcgcctgaaagtctaccgtgagaagacccagccggtcattgactattatagtaagaaaggtattctcgcacgcgtagatgggagccaagaaatcatgcctatcgtggcagaagtcctggggattctgggttggagcgataag

SEQ ID NO: 2742 - protein, 231 aa, synthetic construct
  REGION 1..231: note = variant of adenylate kinase from Thermotoga neapolitana
MHHHHHHGGSGMGAYLVLLGPPGAGKGTQGRIISAKTGIPHISTGDILRQIVAKQNDEVASSIKEWMLKGELVPDEIGNPVVKRRLKEKDCEKGFILDGFPRTVRQAEYLDSFLESQGRQLTAAVLIEVPEDEVVARLLSRRTCPKCGRSYNMIFLPPKEDELCDDCGVSLVQRLDDKEETVRMRLKVYREKTQPVIDYYSKKGILARVDGSQEIMPIVAEVLGILGWSDK

SEQ ID NO: 2743 - DNA, 693 bp, synthetic construct
  misc_feature 1..693: note = variant of adenylate kinase from Thermotoga neapolitana
  source 1..693: mol_type = other DNA
atgcaccatcatcaccatcacgggggctccggcatgggggcatatctggtgttattaggtctgccgggcgcgggaaaaggtacccaaggccgtattatttcggcaaagactggcatcccgcatattagcacgggcgatatcctgcgtcagatcgtcgctaagcaaaacgatgaagttgcctcgagcattaaagagtggatgctgaaaggtgaactcgttccagatgaaattggtaatcctgtagtaaaacgccgcctgaaggagaaagactgcgaaaaaggctttattttggatggtttcccgcgtaccgtgcgccaagcggaatatctggatagttttcttgaaagccagggccgccagttgacagccgccgtgctgattgaggtccccgaagatgaagttgttgcacgtctgctgtctcgccgtgtttgtccgaaatgcgggcgtagttacaacatgatttttctgccaccaaaagaagacgagctgtgtgacgattgcggtgtcagcttagtacagcgtttagatgataaggaagaaacggtccgtatgcgcctgaaagtctaccgtgagaagacccagccggtcattgactattatagtaagaaaggtattctcgcacgcgtagatgggagccaagaaatcatgcctatcgtggcagaagtcctggggattctgggttggagcgataag

SEQ ID NO: 2744 - protein, 231 aa, synthetic construct
  REGION 1..231: note = variant of adenylate kinase from Thermotoga neapolitana
MHHHHHHGGSGMGAYLVLLGLPGAGKGTQGRIISAKTGIPHISTGDILRQIVAKQNDEVASSIKEWMLKGELVPDEIGNPVVKRRLKEKDCEKGFILDGFPRTVRQAEYLDSFLESQGRQLTAAVLIEVPEDEVVARLLSRRVCPKCGRSYNMIFLPPKEDELCDDCGVSLVQRLDDKEETVRMRLKVYREKTQPVIDYYSKKGILARVDGSQEIMPIVAEVLGILGWSDK

SEQ ID NO: 2745 - DNA, 693 bp, synthetic construct
  misc_feature 1..693: note = variant of adenylate kinase from Thermotoga neapolitana
  source 1..693: mol_type = other DNA
atgcaccatcatcaccatcacgggggctccggcatgggggcatatctggtgttattaggtccgccgggcgcgggaaaaggtacccaaggccgtattatttcggcaaagactggcatcccgcatattagcacgggcgatatcctgcgtcagatcgtcgctaagcaaaacgatgaagttgcctcgagcattaaagagtggatgctgaaaggtgaactcgttccagatgaaattggtaatcctgtagtaaaacgccgcctgaaggagaaagactgcgaaaaaggctttattttggatggtttcccgcgtaccgtgcgccaagcggaatatctggatagttttcttgaaagccagggccgccagttgacagccgccgtgctgattgaggtccccgaagatgaagttgttgcacgtctgctgtctcgccgtgtttgtccgaaatgcgggcgtagttacaacatgatttttctgccaccaaaagaagacgagctgtgtgacgattgcggtgtcagcttagtacagcgtttagatgataaggaagaaacggtccgtatgcgcctgaaagtctaccgtgagaagacccagccggtcattgactattatagtaagaaaggtattctcgcacgcgtagatgggagccaagaaatctggcctatcgtggcagaagtcctggggattctgggttggagcgataag

SEQ ID NO: 2746 - protein, 231 aa, synthetic construct
  REGION 1..231: note = variant of adenylate kinase from Thermotoga neapolitana
MHHHHHHGGSGMGAYLVLLGPPGAGKGTQGRIISAKTGIPHISTGDILRQIVAKQNDEVASSIKEWMLKGELVPDEIGNPVVKRRLKEKDCEKGFILDGFPRTVRQAEYLDSFLESQGRQLTAAVLIEVPEDEVVARLLSRRVCPKCGRSYNMIFLPPKEDELCDDCGVSLVQRLDDKEETVRMRLKVYREKTQPVIDYYSKKGILARVDGSQEIWPIVAEVLGILGWSDK

SEQ ID NO: 2747 - DNA, 693 bp, synthetic construct
  misc_feature 1..693: note = variant of adenylate kinase from Thermotoga neapolitana
  source 1..693: mol_type = other DNA
atgcaccatcatcaccatcacgggggctccggcatgggggcatatctggtgttattaggtccgccgggcgcgggaaaaggtacccaaggccgtattatttcggcaaagactggcatcccgcatattagcacgggcgatatcctgcgtcagatcgtcgctaagcaaaacgatgaagttgcctcgagcattaaagagtggatgctgaaaggtgaactcgttccagatgaaattggtaatcctgtagtaaaacgccgcctgaaggagaaagactgcgaaaaaggctttattttggatggtttcccgcgtaccgtgcgccaagcggaatatctggatagttttcttgaaagccagggccgccagttgacagccgccgtgctgattgaggtccccgaagatgaagttgttgcacgtctgctgtctcgccgtgtttgtccgaaatgcgggcgtagttacaacgtgatttttctgccaccaaaagaagacgagctgtgtgacgattgcggtgtcagcttagtacagcgtttagatgataaggaagaaacggtccgtatgcgcctgaaagtctaccgtgagaagacccagccggtcattgactattatagtaagaaaggtattctcgcacgcgtagatgggagccaagaaatcatgcctatcgtggcagaagtcctggggattctgggttggagcgataag

SEQ ID NO: 2748 - protein, 231 aa, synthetic construct
  REGION 1..231: note = variant of adenylate kinase from Thermotoga neapolitana
MHHHHHHGGSGMGAYLVLLGPPGAGKGTQGRIISAKTGIPHISTGDILRQIVAKQNDEVASSIKEWMLKGELVPDEIGNPVVKRRLKEKDCEKGFILDGFPRTVRQAEYLDSFLESQGRQLTAAVLIEVPEDEVVARLLSRRVCPKCGRSYNVIFLPPKEDELCDDCGVSLVQRLDDKEETVRMRLKVYREKTQPVIDYYSKKGILARVDGSQEIMPIVAEVLGILGWSDK

SEQ ID NO: 2749 - DNA, 693 bp, synthetic construct
  misc_feature 1..693: note = variant of adenylate kinase from Thermotoga neapolitana
  source 1..693: mol_type = other DNA
atgcaccatcatcaccatcacgggggctccggcatgggggcatatctggtgttattacctccgccgggcgcgggaaaaggtacccaaggccgtattatttcggcaaagactggcatcccgcatattagcacgggcgatatcctgcgtcagatcgtcgctaagcaaaacgatgaagttgcctcgagcattaaagagtggatgctgaaaggtgaactcgttccagatgaaattggtaatcctgtagtaaaacgccgcctgaaggagaaagactgcgaaaaaggctttattttggatggtttcccgcgtaccgtgcgccaagcggaatatctggatagttttcttgaaagccagggccgccagttgacagccgccgtgctgattgaggtccccgaagatgaagttgttgcacgtctgctgtctcgccgtgtttgtccgaaatgcgggcgtagttacaacatgatttttctgccaccaaaagaagacgagctgtgtgacgattgcggtgtcagcttagtacagcgtttagatgataaggaagaaacggtccgtatgcgcctgaaagtctaccgtgagaagacccagccggtcattgactattatagtaagaaaggtattctcgcacgcgtagatgggagccaagaaatcatgcctatcgtggcagaagtcctggggattctgggttggagcgataag

SEQ ID NO: 2750 - protein, 231 aa, synthetic construct
  REGION 1..231: note = variant of adenylate kinase from Thermotoga neapolitana
MHHHHHHGGSGMGAYLVLLPPPGAGKGTQGRIISAKTGIPHISTGDILRQIVAKQNDEVASSIKEWMLKGELVPDEIGNPVVKRRLKEKDCEKGFILDGFPRTVRQAEYLDSFLESQGRQLTAAVLIEVPEDEVVARLLSRRVCPKCGRSYNMIFLPPKEDELCDDCGVSLVQRLDDKEETVRMRLKVYREKTQPVIDYYSKKGILARVDGSQEIMPIVAEVLGILGWSDK

SEQ ID NO: 2751 - DNA, 693 bp, synthetic construct
  misc_feature 1..693: note = variant of adenylate kinase from Thermotoga neapolitana
  source 1..693: mol_type = other DNA
atgcaccatcatcaccatcacgggggctccggcatgggggcatatctggtgttattaggtccgccgggcgcgggaaaaggtacccaaggccgtattatttcggcaaagactggcatcccgcatattagcacgggcgatatcctgcgtcagatcgtcgctaagcaaaacgatgaagttgcctcgagcattaaagagtggatgctgaaaggtgaactcgttccagatgaaattggtaatcctgtagtaaaacgccgcctgaaggagaaagactgcgaaaaaggctttattttggatggtttcccgcgtaccgtgcgccaagcggaatatctggatagttttcttgaaagccagggccgccagttgacagccgccgtgctgattgaggtccccgaagatgaagttgttgcacgtctgctgtctcgccgtgtttgtccgaaatgcgggcgtagttacaacatgatttttctgccaccaaaagaagacgagctgtgtgacgattgcggtgtcagcttagtacagcgtttagatgataaggaagaaacggtccgtatgcgcctgaaagtctaccgtgagaagacccagccggtcattgactattatagtaagaaaggtattctcgcacgcgtagatgggagccaagaaatcggtcctatcgtggcagaagtcctggggattctgggttggagcgataag

SEQ ID NO: 2752 - protein, 231 aa, synthetic construct
  REGION 1..231: note = variant of adenylate kinase from Thermotoga neapolitana
MHHHHHHGGSGMGAYLVLLGPPGAGKGTQGRIISAKTGIPHISTGDILRQIVAKQNDEVASSIKEWMLKGELVPDEIGNPVVKRRLKEKDCEKGFILDGFPRTVRQAEYLDSFLESQGRQLTAAVLIEVPEDEVVARLLSRRVCPKCGRSYNMIFLPPKEDELCDDCGVSLVQRLDDKEETVRMRLKVYREKTQPVIDYYSKKGILARVDGSQEIGPIVAEVLGILGWSDK

SEQ ID NO: 2753 - DNA, 693 bp, synthetic construct
  misc_feature 1..693: note = variant of adenylate kinase from Thermotoga neapolitana
  source 1..693: mol_type = other DNA
atgcaccatcatcaccatcacgggggctccggcatgggggcatatctggtgttattaggtccgccgggcgcgggaaaaggtacccaaggccgtattatttcggcaaagactggcatcccgcatactagcacgggcgatatcctgcgtcagatcgtcgctaagcaaaacgatgaagttgcctcgagcattaaagagtggatgctgaaaggtgaactcgttccagatgaaattggtaatcctgtagtaaaacgccgcctgaaggagaaagactgcgaaaaaggctttattttggatggtttcccgcgtaccgtgcgccaagcggaatatctggatagttttcttgaaagccagggccgccagttgacagccgccgtgctgattgaggtccccgaagatgaagttgttgcacgtctgctgtctcgccgtgtttgtccgaaatgcgggcgtagttacaacatgatttttctgccaccaaaagaagacgagctgtgtgacgattgcggtgtcagcttagtacagcgtttagatgataaggaagaaacggtccgtatgcgcctgaaagtctaccgtgagaagacccagccggtcattgactattatagtaagaaaggtattctcgcacgcgtagatgggagccaagaaatcatgcctatcgtggcagaagtcctggggattctgggttggagcgataag

SEQ ID NO: 2754 - protein, 231 aa, synthetic construct
  REGION 1..231: note = variant of adenylate kinase from Thermotoga neapolitana
MHHHHHHGGSGMGAYLVLLGPPGAGKGTQGRIISAKTGIPHTSTGDILRQIVAKQNDEVASSIKEWMLKGELVPDEIGNPVVKRRLKEKDCEKGFILDGFPRTVRQAEYLDSFLESQGRQLTAAVLIEVPEDEVVARLLSRRVCPKCGRSYNMIFLPPKEDELCDDCGVSLVQRLDDKEETVRMRLKVYREKTQPVIDYYSKKGILARVDGSQEIMPIVAEVLGILGWSDK

SEQ ID NO: 2755 - DNA, 693 bp, synthetic construct
  misc_feature 1..693: note = variant of adenylate kinase from Thermotoga neapolitana
  source 1..693: mol_type = other DNA
atgcaccatcatcaccatcacgggggctccggcatgggggcatatctggtgttattaggtccgccgggcgcgggaaaaggtacccaaggccgtattatttcggcaaagactggcatcccgcatattagcacgggcgatatcctgcgtcagatcgtcgctaagcaaaacgatgaagttgcctcgagcattaaagagtggatgctgaaaggtgaactcgttccagatgaaattggtaatcctgtagtaaaacgccgcctgaaggagaaagactgcgaaaaaggctttattttggggggtttcccgcgtaccgtgcgccaagcggaatatctggatagttttcttgaaagccagggccgccagttgacagccgccgtgctgattgaggtccccgaagatgaagttgttgcacgtctgctgtctcgccgtgtttgtccgaaatgcgggcgtagttacaacatgatttttctgccaccaaaagaagacgagctgtgtgacgattgcggtgtcagcttagtacagcgtttagatgataaggaagaaacggtccgtatgcgcctgaaagtctaccgtgagaagacccagccggtcattgactattatagtaagaaaggtattctcgcacgcgtagatgggagccaagaaatcatgcctatcgtggcagaagtcctggggattctgggttggagcgataag

SEQ ID NO: 2756 - protein, 231 aa, synthetic construct
  REGION 1..231: note = variant of adenylate kinase from Thermotoga neapolitana
MHHHHHHGGSGMGAYLVLLGPPGAGKGTQGRIISAKTGIPHISTGDILRQIVAKQNDEVASSIKEWMLKGELVPDEIGNPVVKRRLKEKDCEKGFILGGFPRTVRQAEYLDSFLESQGRQLTAAVLIEVPEDEVVARLLSRRVCPKCGRSYNMIFLPPKEDELCDDCGVSLVQRLDDKEETVRMRLKVYREKTQPVIDYYSKKGILARVDGSQEIMPIVAEVLGILGWSDK

SEQ ID NO: 2757 - DNA, 693 bp, synthetic construct
  misc_feature 1..693: note = variant of adenylate kinase from Thermotoga neapolitana
  source 1..693: mol_type = other DNA
atgcaccatcatcaccatcacgggggctccggcatgggggcatatctggtgttattaggtccgccgggcgcgggaaaaggtacccaatatcgtattatttcggcaaagactggcatcccgcatattagcacgggcgatatcctgcgtcagatcgtcgctaagcaaaacgatgaagttgcctcgagcattaaagagtggatgctgaaaggtgaactcgttccagatgaaattggtaatcctgtagtaaaacgccgcctgaaggagaaagactgcgaaaaaggctttattttggatggtttcccgcgtaccgtgcgccaagcggaatatctggatagttttcttgaaagccagggccgccagttgacagccgccgtgctgattgaggtccccgaagatgaagttgttgcacgtctgctgtctcgccgtgtttgtccgaaatgcgggcgtagttacaacatgatttttctgccaccaaaagaagacgagctgtgtgacgattgcggtgtcagcttagtacagcgtttagatgataaggaagaaacggtccgtatgcgcctgaaagtctaccgtgagaagacccagccggtcattgactattatagtaagaaaggtattctcgcacgcgtagatgggagccaagaaatcatgcctatcgtggcagaagtcctggggattctgggttggagcgataag

SEQ ID NO: 2758 - protein, 231 aa, synthetic construct
  REGION 1..231: note = variant of adenylate kinase from Thermotoga neapolitana
MHHHHHHGGSGMGAYLVLLGPPGAGKGTQYRIISAKTGIPHISTGDILRQIVAKQNDEVASSIKEWMLKGELVPDEIGNPVVKRRLKEKDCEKGFILDGFPRTVRQAEYLDSFLESQGRQLTAAVLIEVPEDEVVARLLSRRVCPKCGRSYNMIFLPPKEDELCDDCGVSLVQRLDDKEETVRMRLKVYREKTQPVIDYYSKKGILARVDGSQEIMPIVAEVLGILGWSDK

SEQ ID NO: 2759 - DNA, 693 bp, synthetic construct
  misc_feature 1..693: note = variant of adenylate kinase from Thermotoga neapolitana
  source 1..693: mol_type = other DNA
atgcaccatcatcaccatcacgggggctccggcatgggggcatatctggtgttattaggtccgccgggcgcgggaaaaggtacccaaggccgtattatttcggcaaagactggcatcccgcatattagcacgggcgatatcctgcgtcagatcgtcgctaagcaaaacgatgaagttgcctcgagcattaaagagcctatgctgaaaggtgaactcgttccagatgaaattggtaatcctgtagtaaaacgccgcctgaaggagaaagactgcgaaaaaggctttattttggatggtttcccgcgtaccgtgcgccaagcggaatatctggatagttttcttgaaagccagggccgccagttgacagccgccgtgctgattgaggtccccgaagatgaagttgttgcacgtctgctgtctcgccgtgtttgtccgaaatgcgggcgtagttacaacatgatttttctgccaccaaaagaagacgagctgtgtgacgattgcggtgtcagcttagtacagcgtttagatgataaggaagaaacggtccgtatgcgcctgaaagtctaccgtgagaagacccagccggtcattgactattatagtaagaaaggtattctcgcacgcgtagatgggagccaagaaatcatgcctatcgtggcagaagtcctggggattctgggttggagcgataag

SEQ ID NO: 2760 - protein, 231 aa, synthetic construct
  REGION 1..231: note = variant of adenylate kinase from Thermotoga neapolitana
MHHHHHHGGSGMGAYLVLLGPPGAGKGTQGRIISAKTGIPHISTGDILRQIVAKQNDEVASSIKEPMLKGELVPDEIGNPVVKRRLKEKDCEKGFILDGFPRTVRQAEYLDSFLESQGRQLTAAVLIEVPEDEVVARLLSRRVCPKCGRSYNMIFLPPKEDELCDDCGVSLVQRLDDKEETVRMRLKVYREKTQPVIDYYSKKGILARVDGSQEIMPIVAEVLGILGWSDK

SEQ ID NO: 2761 - DNA, 693 bp, synthetic construct
  misc_feature 1..693: note = variant of adenylate kinase from Thermotoga neapolitana
  source 1..693: mol_type = other DNA
atgcaccatcatcaccatcacgggggctccggcatgggggcatatctggtgttattaggtccgccgggcgcgggaaaaggtacccaaggccgtattatttcggcaaagactggcatcccgcatattagcacgggcgatatcctgcgtcagatcgtcgctaagcaaaacgatgaagttgcctcgagcattaaagagtggatgctgaaaggtgaactcgttccagatgaaattggtaatcctgtagtaaaacgccgcctgaaggagaaagactgcgaaaaaggctttattttggattgtttcccgcgtaccgtgcgccaagcggaatatctggatagttttcttgaaagccagggccgccagttgacagccgccgtgctgattgaggtccccgaagatgaagttgttgcacgtctgctgtctcgccgtgtttgtccgaaatgcgggcgtagttacaacatgatttttctgccaccaaaagaagacgagctgtgtgacgattgcggtgtcagcttagtacagcgtttagatgataaggaagaaacggtccgtatgcgcctgaaagtctaccgtgagaagacccagccggtcattgactattatagtaagaaaggtattctcgcacgcgtagatgggagccaagaaatcatgcctatcgtggcagaagtcctggggattctgggttggagcgataag

SEQ ID NO: 2762 - protein, 231 aa, synthetic construct
  REGION 1..231: note = variant of adenylate kinase from Thermotoga neapolitana
MHHHHHHGGSGMGAYLVLLGPPGAGKGTQGRIISAKTGIPHISTGDILRQIVAKQNDEVASSIKEWMLKGELVPDEIGNPVVKRRLKEKDCEKGFILDCFPRTVRQAEYLDSFLESQGRQLTAAVLIEVPEDEVVARLLSRRVCPKCGRSYNMIFLPPKEDELCDDCGVSLVQRLDDKEETVRMRLKVYREKTQPVIDYYSKKGILARVDGSQEIMPIVAEVLGILGWSDK

SEQ ID NO: 2763 - DNA, 693 bp, synthetic construct
  misc_feature 1..693: note = variant of adenylate kinase from Thermotoga neapolitana
  source 1..693: mol_type = other DNA
atgcaccatcatcaccatcacgggggctccggcatgggggcatatctggtgttattaggtccgccgggcgcgggaaaaggtacccaaggccgtattatttcggcaaagactggcatcccgcatattagcacgggcgatatcctgcgtcagatcgtcgctaagcaaaacgatgaagttgcctcgagcattaaagagtggatgctgaaaggtgaactcgttccagatgaaattggtaatcctgtagtaaaacgccgcctgaaggagaaagactgcgaaaaaggctttattttggatgcgttcccgcgtaccgtgcgccaagcggaatatctggatagttttcttgaaagccagggccgccagttgacagccgccgtgctgattgaggtccccgaagatgaagttgttgcacgtctgctgtctcgccgtgtttgtccgaaatgcgggcgtagttacaacatgatttttctgccaccaaaagaagacgagctgtgtgacgattgcggtgtcagcttagtacagcgtttagatgataaggaagaaacggtccgtatgcgcctgaaagtctaccgtgagaagacccagccggtcattgactattatagtaagaaaggtattctcgcacgcgtagatgggagccaagaaatcatgcctatcgtggcagaagtcctggggattctgggttggagcgataag

SEQ ID NO: 2764 - protein, 231 aa, synthetic construct
  REGION 1..231: note = variant of adenylate kinase from Thermotoga neapolitana
MHHHHHHGGSGMGAYLVLLGPPGAGKGTQGRIISAKTGIPHISTGDILRQIVAKQNDEVASSIKEWMLKGELVPDEIGNPVVKRRLKEKDCEKGFILDAFPRTVRQAEYLDSFLESQGRQLTAAVLIEVPEDEVVARLLSRRVCPKCGRSYNMIFLPPKEDELCDDCGVSLVQRLDDKEETVRMRLKVYREKTQPVIDYYSKKGILARVDGSQEIMPIVAEVLGILGWSDK

SEQ ID NO: 2765 - DNA, 693 bp, synthetic construct
  misc_feature 1..693: note = variant of adenylate kinase from Thermotoga neapolitana
  source 1..693: mol_type = other DNA
atgcaccatcatcaccatcacgggggctccggcatgggggcatatctggtgttattaggtccgccgggcgcgggaaaaggtacccaaggccgtattatttcggcaaagactggcatcccgcatattagcacgggcgatatcctgcgtcagatcgtcgctaagcaaaacgatgaagttgcctcgagcattaaagagtggatgctgaaaggtgaactcgttccagatgaaattggtaatcctgtagtaaaacgccgcctgaaggagaaagactgcgaaaaaggctttattttggatggtttcccgcgtaccgtgcgccaagcggaatatctggatagttttcttgaaagccagggccgccagttgacagccgccgtgctgattgaggtccccgaagatgaagttgttgcacgtctgctgtctcgccgtgtttgtccgaaatgcgggcgtagttacaacatgatttttctgccaccaaaagaagacgagctgtgtgacgattgcggtgtcagcttagtacagcgtttagatgataaggaagaaacggtccgtatgcgcctgaaagtctaccgtgagaagacccagccggtcattgactattatagtaagaaaggtattctcgcacgcgtagatgggagccaagaaatcgatcctatcgtggcagaagtcctggggattctgggttggagcgataag

SEQ ID NO: 2766 - protein, 231 aa, synthetic construct
  REGION 1..231: note = variant of adenylate kinase from Thermotoga neapolitana
MHHHHHHGGSGMGAYLVLLGPPGAGKGTQGRIISAKTGIPHISTGDILRQIVAKQNDEVASSIKEWMLKGELVPDEIGNPVVKRRLKEKDCEKGFILDGFPRTVRQAEYLDSFLESQGRQLTAAVLIEVPEDEVVARLLSRRVCPKCGRSYNMIFLPPKEDELCDDCGVSLVQRLDDKEETVRMRLKVYREKTQPVIDYYSKKGILARVDGSQEIDPIVAEVLGILGWSDK

SEQ ID NO: 2767 - DNA, 693 bp, synthetic construct
  misc_feature 1..693: note = variant of adenylate kinase from Thermotoga neapolitana
  source 1..693: mol_type = other DNA
atgcaccatcatcaccatcacgggggctccggcatgggggcatatctggtgttattaggtccgccgggcgcgggaaaaggtacccaaggccgtattatttcggcaaagactggcatcccgcatattagcacgggcgatatcctgcgtcagatcgtcgctaagcaaaacgatgaagttgcctcgagcattaaagagtggatgctgaaaggtgaactcgttccagatgaaattggtaatcctgtagtaaaacgccgcctgaaggagaaagactgcgaaaaaggctttattttgcagggtttcccgcgtaccgtgcgccaagcggaatatctggatagttttcttgaaagccagggccgccagttgacagccgccgtgctgattgaggtccccgaagatgaagttgttgcacgtctgctgtctcgccgtgtttgtccgaaatgcgggcgtagttacaacatgatttttctgccaccaaaagaagacgagctgtgtgacgattgcggtgtcagcttagtacagcgtttagatgataaggaagaaacggtccgtatgcgcctgaaagtctaccgtgagaagacccagccggtcattgactattatagtaagaaaggtattctcgcacgcgtagatgggagccaagaaatcatgcctatcgtggcagaagtcctggggattctgggttggagcgataag

SEQ ID NO: 2768 - protein, 231 aa, synthetic construct
  REGION 1..231: note = variant of adenylate kinase from Thermotoga neapolitana
MHHHHHHGGSGMGAYLVLLGPPGAGKGTQGRIISAKTGIPHISTGDILRQIVAKQNDEVASSIKEWMLKGELVPDEIGNPVVKRRLKEKDCEKGFILQGFPRTVRQAEYLDSFLESQGRQLTAAVLIEVPEDEVVARLLSRRVCPKCGRSYNMIFLPPKEDELCDDCGVSLVQRLDDKEETVRMRLKVYREKTQPVIDYYSKKGILARVDGSQEIMPIVAEVLGILGWSDK

SEQ ID NO: 2769 - DNA, 693 bp, synthetic construct
  misc_feature 1..693: note = variant of adenylate kinase from Thermotoga neapolitana
  source 1..693: mol_type = other DNA
atgcaccatcatcaccatcacgggggctccggcatgggggcatatctggtgttattaggtccgccgggcgcgggaaaaggtacccaaggccgtattatttcggcaaagactggcatcccgcatattagcacgggcgatatcctgcgtcagatcgtcgctaagcaaaacgatgaagttgcctcgagcattaaagagtggatgctgaaaggtgaactcgttccagatgaaattggtaatcctgtagtaaaacgccgcctgaaggagaaagactgcgaaaaaggctttattttggatggtttcccgtgtaccgtgcgccaagcggaatatctggatagttttcttgaaagccagggccgccagttgacagccgccgtgctgattgaggtccccgaagatgaagttgttgcacgtctgctgtctcgccgtgtttgtccgaaatgcgggcgtagttacaacatgatttttctgccaccaaaagaagacgagctgtgtgacgattgcggtgtcagcttagtacagcgtttagatgataaggaagaaacggtccgtatgcgcctgaaagtctaccgtgagaagacccagccggtcattgactattatagtaagaaaggtattctcgcacgcgtagatgggagccaagaaatcatgcctatcgtggcagaagtcctggggattctgggttggagcgataag

SEQ ID NO: 2770 - protein, 231 aa, synthetic construct
  REGION 1..231: note = variant of adenylate kinase from Thermotoga neapolitana
MHHHHHHGGSGMGAYLVLLGPPGAGKGTQGRIISAKTGIPHISTGDILRQIVAKQNDEVASSIKEWMLKGELVPDEIGNPVVKRRLKEKDCEKGFILDGFPCTVRQAEYLDSFLESQGRQLTAAVLIEVPEDEVVARLLSRRVCPKCGRSYNMIFLPPKEDELCDDCGVSLVQRLDDKEETVRMRLKVYREKTQPVIDYYSKKGILARVDGSQEIMPIVAEVLGILGWSDK

SEQ ID NO: 2771 - DNA, 693 bp, synthetic construct
  misc_feature 1..693: note = variant of adenylate kinase from Thermotoga neapolitana
  source 1..693: mol_type = other DNA
atgcaccatcatcaccatcacgggggctccggcatgggggcatatctggtgttattaggtccgccgggcgcgggaaaaggtacccaaggccgtattatttcggcaaagactggcatcccgcatattagcacgggcgatatcctgcgtcagatcgtcgctaagcaaaacgatgaagttgcctcgagcattaaagagtggatgctgaaaggtgaactcgttccagatgaaattggtaatagtgtagtaaaacgccgcctgaaggagaaagactgcgaaaaaggctttattttggatggtttcccgcgtaccgtgcgccaagcggaatatctggatagttttcttgaaagccagggccgccagttgacagccgccgtgctgattgaggtccccgaagatgaagttgttgcacgtctgctgtctcgccgtgtttgtccgaaatgcgggcgtagttacaacatgatttttctgccaccaaaagaagacgagctgtgtgacgattgcggtgtcagcttagtacagcgtttagatgataaggaagaaacggtccgtatgcgcctgaaagtctaccgtgagaagacccagccggtcattgactattatagtaagaaaggtattctcgcacgcgtagatgggagccaagaaatcatgcctatcgtggcagaagtcctggggattctgggttggagcgataag

SEQ ID NO: 2772 - protein, 231 aa, synthetic construct
  REGION 1..231: note = variant of adenylate kinase from Thermotoga neapolitana
MHHHHHHGGSGMGAYLVLLGPPGAGKGTQGRIISAKTGIPHISTGDILRQIVAKQNDEVASSIKEWMLKGELVPDEIGNSVVKRRLKEKDCEKGFILDGFPRTVRQAEYLDSFLESQGRQLTAAVLIEVPEDEVVARLLSRRVCPKCGRSYNMIFLPPKEDELCDDCGVSLVQRLDDKEETVRMRLKVYREKTQPVIDYYSKKGILARVDGSQEIMPIVAEVLGILGWSDK

SEQ ID NO: 2773 - DNA, 693 bp, synthetic construct
  misc_feature 1..693: note = variant of adenylate kinase from Thermotoga neapolitana
  source 1..693: mol_type = other DNA
atgcaccatcatcaccatcacgggggctccggcatgggggcatatctggtgttattaggtccgccgggcgcgggaaaaggtacccaaggccgtattatttcggcaaagactggcatcccgcatattagcacgggcgatatcctgcgtcagatcgtcgctaagcaaaacgatgaagttgcctcgagcattaaagagtggatgctgaaaggtgaactcgttccagatgaaattggtaatcctgtagtaaaacgccgcctgaaggagaaagactgcgaaaaaggctttattttggatggtttcccgcgtaccgtgcgccaagcggaatatctggatagttttcttgaaagccagggccgccagttgacagccgccgtgctgattgaggtccccgaagatgaagttgttgcacgtctgctgtctcgccgtgtttgtccgaaatgcgggcgtagttacaacatgatttttctgccaccaaaagaagacgagctgtgtgacgattgcggtgtcagcttagtacagcgtttagatgataaggaagaaacggtccgtatgcgcctgaaagtctaccgtgagaagacccagccggtcattgactattatagtaagaaaggtattctcgcacgcgtagatgggagccaagaaatcaatcctatcgtggcagaagtcctggggattctgggttggagcgataag

SEQ ID NO: 2774 - protein, 231 aa, synthetic construct
  REGION 1..231: note = variant of adenylate kinase from Thermotoga neapolitana
MHHHHHHGGSGMGAYLVLLGPPGAGKGTQGRIISAKTGIPHISTGDILRQIVAKQNDEVASSIKEWMLKGELVPDEIGNPVVKRRLKEKDCEKGFILDGFPRTVRQAEYLDSFLESQGRQLTAAVLIEVPEDEVVARLLSRRVCPKCGRSYNMIFLPPKEDELCDDCGVSLVQRLDDKEETVRMRLKVYREKTQPVIDYYSKKGILARVDGSQEINPIVAEVLGILGWSDK

SEQ ID NO: 2775 - DNA, 693 bp, synthetic construct
  misc_feature 1..693: note = variant of adenylate kinase from Thermotoga neapolitana
  source 1..693: mol_type = other DNA
atgcaccatcatcaccatcacgggggctccggcatgggggcatatctggtgttattaggtccgccgggcgcgggaaaatgtacccaaggccgtattatttcggcaaagactggcatcccgcatattagcacgggcgatatcctgcgtcagatcgtcgctaagcaaaacgatgaagttgcctcgagcattaaagagtggatgctgaaaggtgaactcgttccagatgaaattggtaatcctgtagtaaaacgccgcctgaaggagaaagactgcgaaaaaggctttattttggatggtttcccgcgtaccgtgcgccaagcggaatatctggatagttttcttgaaagccagggccgccagttgacagccgccgtgctgattgaggtccccgaagatgaagttgttgcacgtctgctgtctcgccgtgtttgtccgaaatgcgggcgtagttacaacatgatttttctgccaccaaaagaagacgagctgtgtgacgattgcggtgtcagcttagtacagcgtttagatgataaggaagaaacggtccgtatgcgcctgaaagtctaccgtgagaagacccagccggtcattgactattatagtaagaaaggtattctcgcacgcgtagatgggagccaagaaatcatgcctatcgtggcagaagtcctggggattctgggttggagcgataag

SEQ ID NO: 2776 - protein, 231 aa, synthetic construct
  REGION 1..231: note = variant of adenylate kinase from Thermotoga neapolitana
MHHHHHHGGSGMGAYLVLLGPPGAGKCTQGRIISAKTGIPHISTGDILRQIVAKQNDEVASSIKEWMLKGELVPDEIGNPVVKRRLKEKDCEKGFILDGFPRTVRQAEYLDSFLESQGRQLTAAVLIEVPEDEVVARLLSRRVCPKCGRSYNMIFLPPKEDELCDDCGVSLVQRLDDKEETVRMRLKVYREKTQPVIDYYSKKGILARVDGSQEIMPIVAEVLGILGWSDK

SEQ ID NO: 2777 - DNA, 693 bp, synthetic construct
  misc_feature 1..693: note = variant of adenylate kinase from Thermotoga neapolitana
  source 1..693: mol_type = other DNA
atgcaccatcatcaccatcacgggggctccggcatgggggcatatctggtgttattaggtccgccgggcgcgggaaaaggtacccaaggccgtattatttcggcaaagactggcatcccgcatattagcacgggcgatatcctgcgtcagatcgtcgctaagcaaaacgatgaagttgcctcgagcattaaagagtggatgctgaaaggtgaactcgttccagatgaaattggtaatcctgtagtaaaacgccgcctgaaggagaaagactgcgaaaaaggctttattttggatggtttcccgcgtaccgtgcgccaagcggaatatctggatagttttcttgaaagccagggccgccagttgacagccgccgtgctgattgaggtccccgaagatgaagttgttgcacgtctgctgtctcgccgtgtttgtccgaaatgctctcgtagttacaacatgatttttctgccaccaaaagaagacgagctgtgtgacgattgcggtgtcagcttagtacagcgtttagatgataaggaagaaacggtccgtatgcgcctgaaagtctaccgtgagaagacccagccggtcattgactattatagtaagaaaggtattctcgcacgcgtagatgggagccaagaaatcatgcctatcgtggcagaagtcctggggattctgggttggagcgataag

SEQ ID NO: 2778 - protein, 231 aa, synthetic construct
  REGION 1..231: note = variant of adenylate kinase from Thermotoga neapolitana
MHHHHHHGGSGMGAYLVLLGPPGAGKGTQGRIISAKTGIPHISTGDILRQIVAKQNDEVASSIKEWMLKGELVPDEIGNPVVKRRLKEKDCEKGFILDGFPRTVRQAEYLDSFLESQGRQLTAAVLIEVPEDEVVARLLSRRVCPKCSRSYNMIFLPPKEDELCDDCGVSLVQRLDDKEETVRMRLKVYREKTQPVIDYYSKKGILARVDGSQEIMPIVAEVLGILGWSDK

SEQ ID NO: 2779 - DNA, 693 bp, synthetic construct
  misc_feature 1..693: note = variant of adenylate kinase from Thermotoga neapolitana
  source 1..693: mol_type = other DNA
atgcaccatcatcaccatcacgggggctccggcatgggggcatatctggtgttattaggtccgccgggcgcgggaaaaggtacccaaggccgtattatttcggcaaagactggcatcccgcatattagcacgggcgatatcctgcgtcagatcgtcgctaagcaaaacgatgaagttgcctcgagcattaaagagtggatgctgaaaggtgaactcgttccagatgaaattggtaatcctgtagtaaaacgccgcctgaaggagaaagactgcgaaaaaggctttattttggatggtttcccgaataccgtgcgccaagcggaatatctggatagttttcttgaaagccagggccgccagttgacagccgccgtgctgattgaggtccccgaagatgaagttgttgcacgtctgctgtctcgccgtgtttgtccgaaatgcgggcgtagttacaacatgatttttctgccaccaaaagaagacgagctgtgtgacgattgcggtgtcagcttagtacagcgtttagatgataaggaagaaacggtccgtatgcgcctgaaagtctaccgtgagaagacccagccggtcattgactattatagtaagaaaggtattctcgcacgcgtagatgggagccaagaaatcatgcctatcgtggcagaagtcctggggattctgggttggagcgataag

SEQ ID NO: 2780 - protein, 231 aa, synthetic construct
  REGION 1..231: note = variant of adenylate kinase from Thermotoga neapolitana
MHHHHHHGGSGMGAYLVLLGPPGAGKGTQGRIISAKTGIPHISTGDILRQIVAKQNDEVASSIKEWMLKGELVPDEIGNPVVKRRLKEKDCEKGFILDGFPNTVRQAEYLDSFLESQGRQLTAAVLIEVPEDEVVARLLSRRVCPKCGRSYNMIFLPPKEDELCDDCGVSLVQRLDDKEETVRMRLKVYREKTQPVIDYYSKKGILARVDGSQEIMPIVAEVLGILGWSDK

SEQ ID NO: 2781 - DNA, 693 bp, synthetic construct
  misc_feature 1..693: note = variant of adenylate kinase from Thermotoga neapolitana
  source 1..693: mol_type = other DNA
atgcaccatcatcaccatcacgggggctccggcatgggggcatatctggtgttattaggtccgccgggcgcgggaaaaggtacccaaggccgtattatttcggcaaagactggcatcccgcatattagcacgggcgatatcctgcgtcagatcgtcgctaagcaaaacgatgaagttgcctcgagcattaaagagtggaggctgaaaggtgaactcgttccagatgaaattggtaatcctgtagtaaaacgccgcctgaaggagaaagactgcgaaaaaggctttattttggatggtttcccgcgtaccgtgcgccaagcggaatatctggatagttttcttgaaagccagggccgccagttgacagccgccgtgctgattgaggtccccgaagatgaagttgttgcacgtctgctgtctcgccgtgtttgtccgaaatgcgggcgtagttacaacatgatttttctgccaccaaaagaagacgagctgtgtgacgattgcggtgtcagcttagtacagcgtttagatgataaggaagaaacggtccgtatgcgcctgaaagtctaccgtgagaagacccagccggtcattgactattatagtaagaaaggtattctcgcacgcgtagatgggagccaagaaatcatgcctatcgtggcagaagtcctggggattctgggttggagcgataag

SEQ ID NO: 2782 - protein, 231 aa, synthetic construct
  REGION 1..231: note = variant of adenylate kinase from Thermotoga neapolitana
MHHHHHHGGSGMGAYLVLLGPPGAGKGTQGRIISAKTGIPHISTGDILRQIVAKQNDEVASSIKEWRLKGELVPDEIGNPVVKRRLKEKDCEKGFILDGFPRTVRQAEYLDSFLESQGRQLTAAVLIEVPEDEVVARLLSRRVCPKCGRSYNMIFLPPKEDELCDDCGVSLVQRLDDKEETVRMRLKVYREKTQPVIDYYSKKGILARVDGSQEIMPIVAEVLGILGWSDK

SEQ ID NO: 2783 - DNA, 693 bp, synthetic construct
  misc_feature 1..693: note = variant of adenylate kinase from Thermotoga neapolitana
  source 1..693: mol_type = other DNA
atgcaccatcatcaccatcacgggggctccggcatgggggcatatctggtgttattaggtccgccgggcgcgggaaaaggtacccaaggccgtattatttcggcaaagactggcatcccgcatattagcacgggcgatatcctgcgtcagatcgtcgctaagcaaaacgatgaagttgcctcgagcattaaagagtggatgctgaaaggtgaactcgttccagatgaaattggtaatggtgtagtaaaacgccgcctgaaggagaaagactgcgaaaaaggctttattttggatggtttcccgcgtaccgtgcgccaagcggaatatctggatagttttcttgaaagccagggccgccagttgacagccgccgtgctgattgaggtccccgaagatgaagttgttgcacgtctgctgtctcgccgtgtttgtccgaaatgcgggcgtagttacaacatgatttttctgccaccaaaagaagacgagctgtgtgacgattgcggtgtcagcttagtacagcgtttagatgataaggaagaaacggtccgtatgcgcctgaaagtctaccgtgagaagacccagccggtcattgactattatagtaagaaaggtattctcgcacgcgtagatgggagccaagaaatcatgcctatcgtggcagaagtcctggggattctgggttggagcgataag

SEQ ID NO: 2784 - protein, 231 aa, synthetic construct
  REGION 1..231: note = variant of adenylate kinase from Thermotoga neapolitana
MHHHHHHGGSGMGAYLVLLGPPGAGKGTQGRIISAKTGIPHISTGDILRQIVAKQNDEVASSIKEWMLKGELVPDEIGNGVVKRRLKEKDCEKGFILDGFPRTVRQAEYLDSFLESQGRQLTAAVLIEVPEDEVVARLLSRRVCPKCGRSYNMIFLPPKEDELCDDCGVSLVQRLDDKEETVRMRLKVYREKTQPVIDYYSKKGILARVDGSQEIMPIVAEVLGILGWSDK

SEQ ID NO: 2785 - DNA, 693 bp, synthetic construct
  misc_feature 1..693: note = variant of adenylate kinase from Thermotoga neapolitana
  source 1..693: mol_type = other DNA
atgcaccatcatcaccatcacgggggctccggcatgggggcatatctggtggagttaggtccgccgggcgcgggaaaaggtacccaaggccgtattatttcggcaaagactggcatcccgcatattagcacgggcgatatcctgcgtcagatcgtcgctaagcaaaacgatgaagttgcctcgagcattaaagagtggatgctgaaaggtgaactcgttccagatgaaattggtaatcctgtagtaaaacgccgcctgaaggagaaagactgcgaaaaaggctttattttggatggtttcccgcgtaccgtgcgccaagcggaatatctggatagttttcttgaaagccagggccgccagttgacagccgccgtgctgattgaggtccccgaagatgaagttgttgcacgtctgctgtctcgccgtgtttgtccgaaatgcgggcgtagttacaacatgatttttctgccaccaaaagaagacgagctgtgtgacgattgcggtgtcagcttagtacagcgtttagatgataaggaagaaacggtccgtatgcgcctgaaagtctaccgtgagaagacccagccggtcattgactattatagtaagaaaggtattctcgcacgcgtagatgggagccaagaaatcatgcctatcgtggcagaagtcctggggattctgggttggagcgataag

SEQ ID NO: 2786 - protein, 231 aa, synthetic construct
  REGION 1..231: note = variant of adenylate kinase from Thermotoga neapolitana
MHHHHHHGGSGMGAYLVELGPPGAGKGTQGRIISAKTGIPHISTGDILRQIVAKQNDEVASSIKEWMLKGELVPDEIGNPVVKRRLKEKDCEKGFILDGFPRTVRQAEYLDSFLESQGRQLTAAVLIEVPEDEVVARLLSRRVCPKCGRSYNMIFLPPKEDELCDDCGVSLVQRLDDKEETVRMRLKVYREKTQPVIDYYSKKGILARVDGSQEIMPIVAEVLGILGWSDK

SEQ ID NO: 2787 - DNA, 693 bp, synthetic construct
  misc_feature 1..693: note = variant of adenylate kinase from Thermotoga neapolitana
  source 1..693: mol_type = other DNA
atgcaccatcatcaccatcacgggggctccggcatgggggcatatctggtgtgtttaggtccgccgggcgcgggaaaaggtacccaaggccgtattatttcggcaaagactggcatcccgcatattagcacgggcgatatcctgcgtcagatcgtcgctaagcaaaccgatgaagttgcctcgagcattaaagagtggatgctgaaaggtgaactcgttccagatgaaattggtaatcctgtagtaaaacgccgcctgaaggagaaagactgcgaaaaaggctttattttggatggtttcccgcgtaccgtgcgccaagcggaatatctggatagttttcttgaaagccagggccgccagttgacagccgccgtgctgattgaggtccccgaagatgaagttgttgcacgtctgctgtctcgccgtgtttgtccgaaatgcgggcgtagttacaacatgatttttctgccaccaaaagaagacgagctgtgtgacgattgcggtgtcagcttagtacagcgtttagatgataaggaagaaacggtccgtatgcgcctgaaagtctaccgtgagaagacccagccggtcattgactattatagtaagaaaggtattctcgcacgcgtagatgggagccaagaaatcatgcctatcgtggcagaagtcctggggattctgggttggagcgataag

SEQ ID NO: 2788 - protein, 231 aa, synthetic construct
  REGION 1..231: note = variant of adenylate kinase from Thermotoga neapolitana
MHHHHHHGGSGMGAYLVCLGPPGAGKGTQGRIISAKTGIPHISTGDILRQIVAKQTDEVASSIKEWMLKGELVPDEIGNPVVKRRLKEKDCEKGFILDGFPRTVRQAEYLDSFLESQGRQLTAAVLIEVPEDEVVARLLSRRVCPKCGRSYNMIFLPPKEDELCDDCGVSLVQRLDDKEETVRMRLKVYREKTQPVIDYYSKKGILARVDGSQEIMPIVAEVLGILGWSDK

SEQ ID NO: 2789 - DNA, 693 bp, synthetic construct
  misc_feature 1..693: note = variant of adenylate kinase from Thermotoga neapolitana
  source 1..693: mol_type = other DNA
atgcaccatcatcaccatcacgggggctccggcatgggggcatatctggtgttattaggtccgccgggcgcgggaaaaggtacccaaggccgtattatttcggcaaagactggcatcccgcatattagcacgggcgatatcctgcgtcagatcgtcgctaagcaaaacgatgaagttgcctcgagcattaaagagtggatgctgaaaggtgaactcgttccagatgaaattggtaatcctgtagtaaaacgccgcctgaaggagaaagactgcgaaaaaggctttattttggatggtttcccgcgtaccgtgcgccaagcggaatatctggatagttttcttgaaagccagggccgccagttgacagccgccgtgctgattgaggtccccgaagatgaagttgttgcacgtctgcattctcgccgtgtttgtccgaaatgcgggcgtagttacaacatgatttttctgccaccaaaagaagacgagctgtgtgacgattgcggtgtcagcttagtacagcgtttagatgataaggaagaaacggtccgtatgcgcctgaaagtctaccgtgagaagacccagccggtcattgactattatagtaagaaaggtattctcgcacgcgtagatgggagccaagaaatcatgcctatcgtggcagaagtcctggggattctgggttggagcgataag

SEQ ID NO: 2790 - protein, 231 aa, synthetic construct
  REGION 1..231: note = variant of adenylate kinase from Thermotoga neapolitana
MHHHHHHGGSGMGAYLVLLGPPGAGKGTQGRIISAKTGIPHISTGDILRQIVAKQNDEVASSIKEWMLKGELVPDEIGNPVVKRRLKEKDCEKGFILDGFPRTVRQAEYLDSFLESQGRQLTAAVLIEVPEDEVVARLHSRRVCPKCGRSYNMIFLPPKEDELCDDCGVSLVQRLDDKEETVRMRLKVYREKTQPVIDYYSKKGILARVDGSQEIMPIVAEVLGILGWSDK

SEQ ID NO: 2791 - DNA, 693 bp, synthetic construct
  misc_feature 1..693: note = variant of adenylate kinase from Thermotoga neapolitana
  source 1..693: mol_type = other DNA
atgcaccatcatcaccatcacgggggctccggcatgggggcatatctggtgttattaggtccgccgggcgcgggaaaaggtacccaaggccgtattatttcggcaaagactggcatcccgcatattagcacgggcgatatcctgcgtcagatcgtcgctaagcaaaacgatgaagttgcctcgagcattaaagagtggatgctgaaacgggaactcgttccagatgaaattggtaatcctgtagtaaaacgccgcctgaaggagaaagactgcgaaaaaggctttattttggatggtttcccgcgtaccgtgcgccaagcggaatatctggatagttttcttgaaagccagggccgccagttgacagccgccgtgctgattgaggtccccgaagatgaagttgttgcacgtctgctgtctcgccgtgtttgtccgaaatgcgggcgtagttacaacatgatttttctgccaccaaaagaagacgagctgtgtgacgattgcggtgtcagcttagtacagcgtttagatgataaggaagaaacggtccgtatgcgcctgaaagtctaccgtgagaagacccagccggtcattgactattatagtaagaaaggtattctcgcacgcgtagatgggagccaagaaatcatgcctatcgtggcagaagtcctggggattctgggttggagcgataag

SEQ ID NO: 2792 - protein, 231 aa, synthetic construct
  REGION 1..231: note = variant of adenylate kinase from Thermotoga neapolitana
MHHHHHHGGSGMGAYLVLLGPPGAGKGTQGRIISAKTGIPHISTGDILRQIVAKQNDEVASSIKEWMLKRELVPDEIGNPVVKRRLKEKDCEKGFILDGFPRTVRQAEYLDSFLESQGRQLTAAVLIEVPEDEVVARLLSRRVCPKCGRSYNMIFLPPKEDELCDDCGVSLVQRLDDKEETVRMRLKVYREKTQPVIDYYSKKGILARVDGSQEIMPIVAEVLGILGWSDK

SEQ ID NO: 2793 - DNA, 693 bp, synthetic construct
  misc_feature 1..693: note = variant of adenylate kinase from Thermotoga neapolitana
  source 1..693: mol_type = other DNA
atgcaccatcatcaccatcacgggggctccggcatgggggcatatctggtgttattaggtccgccgggcgcgggaaaaggtacccaaggccgtattatttcggcaaagactggcatcccgcatattagcacgggcgatatcctgcgtcagatcgtcgctaagcaaaacgatgaagttgcctcgagcattaaagagtggatgctgaaaggtgaactcgttccagatgaaattggtaatcctgtagtaaaacgccgcctgaaggagaaagactgcgaaaaaggctttattttggatggtttcccgcgtaccgtgcgccaagcggaatatctggatagttttcttgaaagccagggccgccagttgacagccgccgtgctgattgaggtccccgaagatgaagttgttgcacgtctgctgtctcgccgtgtttgtccgaaatgcgggcgtagttacaacatgatttttctgccaccaaaagaagacgagctgtgtgacgattgcggtgtcagcttagtacagcgtttagatgataaggaagaaacggtccgtatgcgcctgaaagtctaccgtgagaagacccagccggtcattgactattatagtaagaaaggtattctcgcacgcgtagatgggagccaagaaatcgagcctatcgtggcagaagtcctggggattctgggttggagcgataag

SEQ ID NO: 2794 - protein, 231 aa, synthetic construct
  REGION 1..231: note = variant of adenylate kinase from Thermotoga neapolitana
MHHHHHHGGSGMGAYLVLLGPPGAGKGTQGRIISAKTGIPHISTGDILRQIVAKQNDEVASSIKEWMLKGELVPDEIGNPVVKRRLKEKDCEKGFILDGFPRTVRQAEYLDSFLESQGRQLTAAVLIEVPEDEVVARLLSRRVCPKCGRSYNMIFLPPKEDELCDDCGVSLVQRLDDKEETVRMRLKVYREKTQPVIDYYSKKGILARVDGSQEIEPIVAEVLGILGWSDK

SEQ ID NO: 2795 - DNA, 693 bp, synthetic construct
  misc_feature 1..693: note = variant of adenylate kinase from Thermotoga neapolitana
  source 1..693: mol_type = other DNA
atgcaccatcatcaccatcacgggggctccggcatgggggcatatctggtgttattaggtccgccgggcgcgggaaaaggtacccaaggccgtattatttcggcaaagactggcatcccgcatattagcacgggcgatatcctgcgtcagatcgtcgctaagcaaaacgatgaagttgcctcgagcattaaagagtggatgctgaaaggtgaactcgttccagatgaaattggtaatcctgtagtaaaacgccgcctgaaggagaaagactgcgaaaaaggctttattttggatggtttcccgcgtaccgtgcgccaagcggaatatctggatagttttcttgaaagccagggccgccagttgacagccgccgtgctgattgaggtccccgaagatgaagttgttgcacgtctgctgtctcgccgtgtttgtccgaaatgcgggcgtagttacaacatgatttttctgccaccaaaagaagacgagctgtgtgacgattgcggtgtcagcttagtacagcgtttagatgataaggaagaaacggtccgtaatcgcctgaaagtctaccgtgagaagacccagccggtcattgactattatagtaagaaaggtattctcgcacgcgtagatgggagccaagaaatcatgcctatcgtggcagaagtcctggggattctgggttggagcgataag

SEQ ID NO: 2796 - protein, 231 aa, synthetic construct
  REGION 1..231: note = variant of adenylate kinase from Thermotoga neapolitana
MHHHHHHGGSGMGAYLVLLGPPGAGKGTQGRIISAKTGIPHISTGDILRQIVAKQNDEVASSIKEWMLKGELVPDEIGNPVVKRRLKEKDCEKGFILDGFPRTVRQAEYLDSFLESQGRQLTAAVLIEVPEDEVVARLLSRRVCPKCGRSYNMIFLPPKEDELCDDCGVSLVQRLDDKEETVRNRLKVYREKTQPVIDYYSKKGILARVDGSQEIMPIVAEVLGILGWSDK

SEQ ID NO: 2797 - DNA, 693 bp, synthetic construct
  misc_feature 1..693: note = variant of adenylate kinase from Thermotoga neapolitana
  source 1..693: mol_type = other DNA
atgcaccatcatcaccatcacgggggctccggcatgggggcatatctggtgttattaggtccgccgggcgcgggaaaaggtacccaaggccgtattatttcggcaaagactggcatcccgcatattagcacgggcgatatcctgcgtcagatcgtcgctaagcaaaacgatgaagttgcctcgagcattaaagagtggatgctgaaaggtgaactcgttccagatgaaattggtaatcctgtagtaaaacgccgcctgaaggagaaagactgcgaaaaaggctttattttggatggtttcccgcgtaccgtgcgccaagcggaatatctggatagttttcttgaaagccagggccgccagttgacagccgccgtgctgattgaggtccccgaagatgaagttgttgcacgtctgctgtctcgcctggtttgtccgaaatgcgggcgtagttacaacatgatttttctgccaccaaaagaagacgagctgtgtgacgattgcggtgtcagcttagtacagcgtttagatgataaggaagaaacggtccgtatgcgcctgaaagtctaccgtgagaagacccagccggtcattgactattatagtaagaaaggtattctcgcacgcgtagatgggagccaagaaatcatgcctatcgtggcagaagtcctggggattctgggttggagcgataag

SEQ ID NO: 2798 - protein, 231 aa, synthetic construct
  REGION 1..231: note = variant of adenylate kinase from Thermotoga neapolitana
MHHHHHHGGSGMGAYLVLLGPPGAGKGTQGRIISAKTGIPHISTGDILRQIVAKQNDEVASSIKEWMLKGELVPDEIGNPVVKRRLKEKDCEKGFILDGFPRTVRQAEYLDSFLESQGRQLTAAVLIEVPEDEVVARLLSRLVCPKCGRSYNMIFLPPKEDELCDDCGVSLVQRLDDKEETVRMRLKVYREKTQPVIDYYSKKGILARVDGSQEIMPIVAEVLGILGWSDK

SEQ ID NO: 2799 - DNA, 693 bp, synthetic construct
  misc_feature 1..693: note = variant of adenylate kinase from Thermotoga neapolitana
  source 1..693: mol_type = other DNA
atgcaccatcatcaccatcacgggggctccggcatgggggcatatctggtgttattaggtccgccgggcgcgggacttggtacccaaggccgtattatttcggcaaagactggcatcccgcatattagcacgggcgatatcctgcgtcagatcgtcgctaagcaaaacgatgaagttgcctcgagcattaaagagtggatgctgaaaggtgaactcgttccagatgaaattggtaatcctgtagtaaaacgccgcctgaaggagaaagactgcgaaaaaggctttattttggatggtttcccgcgtaccgtgcgccaagcggaatatctggatagttttcttgaaagccagggccgccagttgacagccgccgtgctgattgaggtccccgaagatgaagttgttgcacgtctgctgtctcgccgtgtttgtccgaaatgcgggcgtagttacaacatgatttttctgccaccaaaagaagacgagctgtgtgacgattgcggtgtcagcttagtacagcgtttagatgataaggaagaaacggtccgtatgcgcctgaaagtctaccgtgagaagacccagccggtcattgactattatagtaagaaaggtattctcgcacgcgtagatgggagccaagaaatcatgcctatcgtggcagaagtcctggggattctgggttggagcgataag

SEQ ID NO: 2800 - protein, 231 aa, synthetic construct
  REGION 1..231: note = variant of adenylate kinase from Thermotoga neapolitana
MHHHHHHGGSGMGAYLVLLGPPGAGLGTQGRIISAKTGIPHISTGDILRQIVAKQNDEVASSIKEWMLKGELVPDEIGNPVVKRRLKEKDCEKGFILDGFPRTVRQAEYLDSFLESQGRQLTAAVLIEVPEDEVVARLLSRRVCPKCGRSYNMIFLPPKEDELCDDCGVSLVQRLDDKEETVRMRLKVYREKTQPVIDYYSKKGILARVDGSQEIMPIVAEVLGILGWSDK

SEQ ID NO: 2801 - DNA, 693 bp, synthetic construct
  misc_feature 1..693: note = variant of adenylate kinase from Thermotoga neapolitana
  source 1..693: mol_type = other DNA
atgcaccatcatcaccatcacgggggctccggcatgggggcatatctggtgttattaggtccgccgggcgcgggaaaaggtacccaaggccgtcttatttcggcaaagactggcatcccgcatattagcacgggcgatatcctgcgtcagatcgtcgctaagcaaaacgatgaagttgcctcgagcattaaagagtggatgctgaaaggtgaactcgttccagatgaaattggtaatcctgtagtaaaacgccgcctgaaggagaaagactgcgaaaaaggctttattttggatggtttcccgcgtaccgtgcgccaagcggaatatctggatagttttcttgaaagccagggccgccagttgacagccgccgtgctgattgaggtccccgaagatgaagttgttgcacgtctgctgtctcgccgtgtttgtccgaaatgcgggcgtagttacaacatgatttttctgccaccaaaagaagacgagctgtgtgacgattgcggtgtcagcttagtacagcgtttagatgataaggaagaaacggtccgtatgcgcctgaaagtctaccgtgagaagacccagccggtcattgactattatagtaagaaaggtattctcgcacgcgtagatgggagccaagaaatcatgcctatcgtggcagaagtcctggggattctgggttggagcgataag

SEQ ID NO: 2802 - protein, 231 aa, synthetic construct
  REGION 1..231: note = variant of adenylate kinase from Thermotoga neapolitana
MHHHHHHGGSGMGAYLVLLGPPGAGKGTQGRLISAKTGIPHISTGDILRQIVAKQNDEVASSIKEWMLKGELVPDEIGNPVVKRRLKEKDCEKGFILDGFPRTVRQAEYLDSFLESQGRQLTAAVLIEVPEDEVVARLLSRRVCPKCGRSYNMIFLPPKEDELCDDCGVSLVQRLDDKEETVRMRLKVYREKTQPVIDYYSKKGILARVDGSQEIMPIVAEVLGILGWSDK

SEQ ID NO: 2803 - DNA, 693 bp, synthetic construct
  misc_feature 1..693: note = variant of adenylate kinase from Thermotoga neapolitana
  source 1..693: mol_type = other DNA
atgcaccatcatcaccatcacgggggctccggcatgggggcatatctggtgttattaggtccgccgggcgcgggaaaaggtacccaaggccgtattatttcggcaaagactggcatcccgcatattagcacgggcgatatcctgcgtcagatcgtcgctaagcaaaacgatgaagttgcctcgagcattaaagagtggatgctgaaaggtgaactcgttccagatgaaattggtaatcctgtagtaaaacgccgcctgaaggagaaagactgcgaaaaaggctttattttggctggtttcccgcgtaccgtgcgccaagcggaatatctggatagttttcttgaaagccagggccgccagttgacagccgccgtgctgattgaggtccccgaagatgaagttgttgcacgtctgctgtctcgccgtgtttgtccgaaatgcgggcgtagttacaacatgatttttctgccaccaaaagaagacgagctgtgtgacgattgcggtgtcagcttagtacagcgtttagatgataaggaagaaacggtccgtatgcgcctgaaagtctaccgtgagaagacccagccggtcattgactattatagtaagaaaggtattctcgcacgcgtagatgggagccaagaaatcatgcctatcgtggcagaagtcctggggattctgggttggagcgataag

SEQ ID NO: 2804 - protein, 231 aa, synthetic construct
  REGION 1..231: note = variant of adenylate kinase from Thermotoga neapolitana
MHHHHHHGGSGMGAYLVLLGPPGAGKGTQGRIISAKTGIPHISTGDILRQIVAKQNDEVASSIKEWMLKGELVPDEIGNPVVKRRLKEKDCEKGFILAGFPRTVRQAEYLDSFLESQGRQLTAAVLIEVPEDEVVARLLSRRVCPKCGRSYNMIFLPPKEDELCDDCGVSLVQRLDDKEETVRMRLKVYREKTQPVIDYYSKKGILARVDGSQEIMPIVAEVLGILGWSDK

SEQ ID NO: 2805 - DNA, 693 bp, synthetic construct
  misc_feature 1..693: note = variant of adenylate kinase from Thermotoga neapolitana
  source 1..693: mol_type = other DNA
atgcaccatcatcaccatcacgggggctccggcatgggggcatatctggtgttattaggtccgccgggcgcgggaaaaggtacccaaggccgtattatttcggcaaagactggcatcccgcatattagcacgggcgatatcctgcgtcagatcgtcgctaagcaaaacgatgaagttgcctcgagcattaaagagtggatgctgaaaggtgaactcgttccagatgaaattggtaatcctgtagtaaaacgccgcctgaaggagaaagactgcgaaaaaggctttattttggatggtttcccgcgtaccgtgcgccaagcggaatatctggatagttttcttgaaagccagggccgccagttgacagccgccgtgctgattgaggtccccgaagatgaagttgttgcacgtctgctgtctcgccgtgtttgtccgaaatgcgggcgtagttactttatgatttttctgccaccaaaagaagacgagctgtgtgacgattgcggtgtcagcttagtacagcgtttagatgataaggaagaaacggtccgtatgcgcctgaaagtctaccgtgagaagacccagccggtcattgactattatagtaagaaaggtattctcgcacgcgtagatgggagccaagaaatcatgcctatcgtggcagaagtcctggggattctgggttggagcgataag

SEQ ID NO: 2806 - protein, 231 aa, synthetic construct
  REGION 1..231: note = variant of adenylate kinase from Thermotoga neapolitana
MHHHHHHGGSGMGAYLVLLGPPGAGKGTQGRIISAKTGIPHISTGDILRQIVAKQNDEVASSIKEWMLKGELVPDEIGNPVVKRRLKEKDCEKGFILDGFPRTVRQAEYLDSFLESQGRQLTAAVLIEVPEDEVVARLLSRRVCPKCGRSYFMIFLPPKEDELCDDCGVSLVQRLDDKEETVRMRLKVYREKTQPVIDYYSKKGILARVDGSQEIMPIVAEVLGILGWSDK

SEQ ID NO: 2807 - DNA, 693 bp, synthetic construct
  misc_feature 1..693: note = variant of adenylate kinase from Thermotoga neapolitana
  source 1..693: mol_type = other DNA
atgcaccatcatcaccatcacgggggctccggcatgggggcatatctggtgttattaggtccgccgggcgcgggaaaaggtacccaatctcgtattatttcggcaaagactggcatcccgcatattagcacgggcgatatcctgcgtcagatcgtcgctaagcaaaacgatgaagttgcctcgagcattaaagagtggatgctgaaaggtgaactcgttccagatgaaattggtaatcctgtagtaaaacgccgcctgaaggagaaagactgcgaaaaaggctttattttggatggtttcccgcgtaccgtgcgccaagcggaatatctggatagttttcttgaaagccagggccgccagttgacagccgccgtgctgattgaggtccccgaagatgaagttgttgcacgtctgctgtctcgccgtgtttgtccgaaatgcgggcgtagttacaacatgatttttctgccaccaaaagaagacgagctgtgtgacgattgcggtgtcagcttagtacagcgtttagatgataaggaagaaacggtccgtatgcgcctgaaagtctaccgtgagaagacccagccggtcattgactattatagtaagaaaggtattctcgcacgcgtagatgggagccaagaaatcatgcctatcgtggcagaagtcctggggattctgggttggagcgataag

SEQ ID NO: 2808 - protein, 231 aa, synthetic construct
  REGION 1..231: note = variant of adenylate kinase from Thermotoga neapolitana
MHHHHHHGGSGMGAYLVLLGPPGAGKGTQSRIISAKTGIPHISTGDILRQIVAKQNDEVASSIKEWMLKGELVPDEIGNPVVKRRLKEKDCEKGFILDGFPRTVRQAEYLDSFLESQGRQLTAAVLIEVPEDEVVARLLSRRVCPKCGRSYNMIFLPPKEDELCDDCGVSLVQRLDDKEETVRMRLKVYREKTQPVIDYYSKKGILARVDGSQEIMPIVAEVLGILGWSDK

SEQ ID NO: 2809 - DNA, 693 bp, synthetic construct
  misc_feature 1..693: note = variant of adenylate kinase from Thermotoga neapolitana
  source 1..693: mol_type = other DNA
atgcaccatcatcaccatcacgggggctccggcatgggggcatatctggtgttattaggtccgccgggcgcgggaaaaggtacccaaggccgtattatttcggcaaagactggcatcccgcatattagcacgggcgatatcctgcgtcagatcgtcgctaagcaaaacgatgaagttgcctcgagcattaaagagtggatgctgaaaggtgaactcgttccagatgaaattggtaatcctgtagtaaaacgccgcctgaaggagaaagactgcgaaaaaggctttattttggatggtttcccgcgtaccgtgcgccaagcggaatatctggatagttttcttgaaagccagggccgccagttgacagccgccgtgctgattgaggtccccgaagatgaagttgttgcacgtctgctgtctgttcgtgtttgtccgaaatgcgggcgtagttacaacatgatttttctgccaccaaaagaagacgagctgtgtgacgattgcggtgtcagcttagtacagcgtttagatgataaggaagaaacggtccgtatgcgcctgaaagtctaccgtgagaagacccagccggtcattgactattatagtaagaaaggtattctcgcacgcgtagatgggagccaagaaatcatgcctatcgtggcagaagtcctggggattctgggttggagcgataag

SEQ ID NO: 2810 - protein, 231 aa, synthetic construct
  REGION 1..231: note = variant of adenylate kinase from Thermotoga neapolitana
MHHHHHHGGSGMGAYLVLLGPPGAGKGTQGRIISAKTGIPHISTGDILRQIVAKQNDEVASSIKEWMLKGELVPDEIGNPVVKRRLKEKDCEKGFILDGFPRTVRQAEYLDSFLESQGRQLTAAVLIEVPEDEVVARLLSVRVCPKCGRSYNMIFLPPKEDELCDDCGVSLVQRLDDKEETVRMRLKVYREKTQPVIDYYSKKGILARVDGSQEIMPIVAEVLGILGWSDK

SEQ ID NO: 2811 - DNA, 693 bp, synthetic construct
  misc_feature 1..693: note = variant of adenylate kinase from Thermotoga neapolitana
  source 1..693: mol_type = other DNA
atgcaccatcatcaccatcacgggggctccggcatgggggcatatctggtgttattaactccgccgggcgcgggaaaaggtacccaaggccgtattatttcggcaaagactggcatcccgcatattagcacgggcgatatcctgcgtcagatcgtcgctaagcaaaacgatgaagttgcctcgagcattaaagagtggatgctgaaaggtgaactcgttccagatgaaattggtaatcctgtagtaaaacgccgcctgaaggagaaagactgcgaaaaaggctttattttggatggtttcccgcgtaccgtgcgccaagcggaatatctggatagttttcttgaaagccagggccgccagttgacagccgccgtgctgattgaggtccccgaagatgaagttgttgcacgtctgctgtctcgccgtgtttgtccgaaatgcgggcgtagttacaacatgatttttctgccaccaaaagaagacgagctgtgtgacgattgcggtgtcagcttagtacagcgtttagatgataaggaagaaacggtccgtatgcgcctgaaagtctaccgtgagaagacccagccggtcattgactattatagtaagaaaggtattctcgcacgcgtagatgggagccaagaaatcatgcctatcgtggcagaagtcctggggattctgggttggagcgataag

SEQ ID NO: 2812 - protein, 231 aa, synthetic construct
  REGION 1..231: note = variant of adenylate kinase from Thermotoga neapolitana
MHHHHHHGGSGMGAYLVLLTPPGAGKGTQGRIISAKTGIPHISTGDILRQIVAKQNDEVASSIKEWMLKGELVPDEIGNPVVKRRLKEKDCEKGFILDGFPRTVRQAEYLDSFLESQGRQLTAAVLIEVPEDEVVARLLSRRVCPKCGRSYNMIFLPPKEDELCDDCGVSLVQRLDDKEETVRMRLKVYREKTQPVIDYYSKKGILARVDGSQEIMPIVAEVLGILGWSDK

SEQ ID NO: 2813 - DNA, 693 bp, synthetic construct
  misc_feature 1..693: note = variant of adenylate kinase from Thermotoga neapolitana
  source 1..693: mol_type = other DNA
atgcaccatcatcaccatcacgggggctccggcatgggggcatatctggtgttattaggtccgccgggcgcgggaaaaggtacccaaggccgtattatttcggcaaagactggcatcccgcatattagcacgggcgatatcctgcgtcagatcgtcgctaagcaaaacgatgaagttgcctcgagcattaaagagtggatgctgaaaggtgaactcgttccagatgaaattggtaatcctgtagtaaaacgccgcctgaaggagaaagactgcgaaaaaggctttattttggatggtttcccggcgaccgtgcgccaagcggaatatctggatagttttcttgaaagccagggccgccagttgacagccgccgtgctgattgaggtccccgaagatgaagttgttgcacgtctgctgtctcgccgtgtttgtccgaaatgcgggcgtagttacaacatgatttttctgccaccaaaagaagacgagctgtgtgacgattgcggtgtcagcttagtacagcgtttagatgataaggaagaaacggtccgtatgcgcctgaaagtctaccgtgagaagacccagccggtcattgactattatagtaagaaaggtattctcgcacgcgtagatgggagccaagaaatcatgcctatcgtggcagaagtcctggggattctgggttggagcgataag

SEQ ID NO: 2814 - protein, 231 aa, synthetic construct
  REGION 1..231: note = variant of adenylate kinase from Thermotoga neapolitana
MHHHHHHGGSGMGAYLVLLGPPGAGKGTQGRIISAKTGIPHISTGDILRQIVAKQNDEVASSIKEWMLKGELVPDEIGNPVVKRRLKEKDCEKGFILDGFPATVRQAEYLDSFLESQGRQLTAAVLIEVPEDEVVARLLSRRVCPKCGRSYNMIFLPPKEDELCDDCGVSLVQRLDDKEETVRMRLKVYREKTQPVIDYYSKKGILARVDGSQEIMPIVAEVLGILGWSDK

SEQ ID NO: 2815 - DNA, 693 bp, synthetic construct
  misc_feature 1..693: note = variant of adenylate kinase from Thermotoga neapolitana
  source 1..693: mol_type = other DNA
atgcaccatcatcaccatcacgggggctccggcatgggggcatatctggtgttattagttccgccgggcgcgggaaaaggtacccaaggccgtattatttcggcaaagactggcatcccgcatattagcacgggcgatatcctgcgtcagatcgtcgctaagcaaaacgatgaagttgcctcgagcattaaagagtggatgctgaaaggtgaactcgttccagatgaaattggtaatcctgtagtaaaacgccgcctgaaggagaaagactgcgaaaaaggctttattttggatggtttcccgcgtaccgtgcgccaagcggaatatctggatagttttcttgaaagccagggccgccagttgacagccgccgtgctgattgaggtccccgaagatgaagttgttgcacgtctgctgtctcgccgtgtttgtccgaaatgcgggcgtagttacaacatgatttttctgccaccaaaagaagacgagctgtgtgacgattgcggtgtcagcttagtacagcgtttagatgataaggaagaaacggtccgtatgcgcctgaaagtctaccgtgagaagacccagccggtcattgactattatagtaagaaaggtattctcgcacgcgtagatgggagccaagaaatcatgcctatcgtggcagaagtcctggggattctgggttggagcgataag

SEQ ID NO: 2816 - protein, 231 aa, synthetic construct
  REGION 1..231: note = variant of adenylate kinase from Thermotoga neapolitana
MHHHHHHGGSGMGAYLVLLVPPGAGKGTQGRIISAKTGIPHISTGDILRQIVAKQNDEVASSIKEWMLKGELVPDEIGNPVVKRRLKEKDCEKGFILDGFPRTVRQAEYLDSFLESQGRQLTAAVLIEVPEDEVVARLLSRRVCPKCGRSYNMIFLPPKEDELCDDCGVSLVQRLDDKEETVRMRLKVYREKTQPVIDYYSKKGILARVDGSQEIMPIVAEVLGILGWSDK

SEQ ID NO: 2817 - DNA, 693 bp, synthetic construct
  misc_feature 1..693: note = variant of adenylate kinase from Thermotoga neapolitana
  source 1..693: mol_type = other DNA
atgcaccatcatcaccatcacgggggctccggcatgggggcatatctggtgttattaggtccgccgggcgcgggaaaaggtacccaaggccgtattatttcggcaaagactggcatcccgcatattagcacgggcgatatcctgcgtcagatcgtcgctaagcaaaacgatgaagttgcctcgagcattaaagagtggatgctgaaaggtgaactcgttccagatgaaattggtaatcctgtagtaaaacgccgcctgaaggagaaagactgcgaaaaaggctttattttggatggtttcccgcgtaccgtgcgccaagcggaatatctggatagttttcttgaaagccagggccgccagttgacagccgccgtgctgattgaggtccccgaagatgaagttattgcacgtctgctgtctcgccgtgtttgtccgaaatgcgggcgtagttacaacatgatttttctgccaccaaaagaagacgagctgtgtgacgattgcggtgtcagcttagtacagcgtttagatgataaggaagaaacggtccgtatgcgcctgaaagtctaccgtgagaagacccagccggtcattgactattatagtaagaaaggtattctcgcacgcgtagatgggagccaagaaatcatgcctatcgtggcagaagtcctggggattctgggttggagcgataag

SEQ ID NO: 2818 - protein, 231 aa, synthetic construct
  REGION 1..231: note = variant of adenylate kinase from Thermotoga neapolitana
MHHHHHHGGSGMGAYLVLLGPPGAGKGTQGRIISAKTGIPHISTGDILRQIVAKQNDEVASSIKEWMLKGELVPDEIGNPVVKRRLKEKDCEKGFILDGFPRTVRQAEYLDSFLESQGRQLTAAVLIEVPEDEVIARLLSRRVCPKCGRSYNMIFLPPKEDELCDDCGVSLVQRLDDKEETVRMRLKVYREKTQPVIDYYSKKGILARVDGSQEIMPIVAEVLGILGWSDK

SEQ ID NO: 2819 - DNA, 693 bp, synthetic construct
  misc_feature 1..693: note = variant of adenylate kinase from Thermotoga neapolitana
  source 1..693: mol_type = other DNA
atgcaccatcatcaccatcacgggggctccggcatgggggcatatctggtgttattaggtccgccgggcgcgggaaaaggtacccaaggccgtattatttcggcaaagactggcatcccgcatattagcacgggcgatatcctgcgtcagatcgtcgctaagcaaaacgatgaagttgcctcgagcattaaagagtggatgctgaaaggtgaactcgttccagatgaaattggtaatcctgtagtaaaacgccgcctgaaggagaaagactgcgaaaaaggctttattttggatggtttcccgcgtaccgtgcgccaagcggaatatctggatagttttcttgaaagccagggccgccagttgacagccgccgtgctgattgaggtccccgaagatgaagttgttgcacgtctgctgtctgggcgtgtttgtccgaaatgcgggcgtagttacaacatgatttttctgccaccaaaagaagacgagctgtgtgacgattgcggtgtcagcttagtacagcgtttagatgataaggaagaaacggtccgtatgcgcctgaaagtctaccgtgagaagacccagccggtcattgactattatagtaagaaaggtattctcgcacgcgtagatgggagccaagaaatcatgcctatcgtggcagaagtcctggggattctgggttggagcgataag

SEQ ID NO: 2820 - protein, 231 aa, synthetic construct
  REGION 1..231: note = variant of adenylate kinase from Thermotoga neapolitana
MHHHHHHGGSGMGAYLVLLGPPGAGKGTQGRIISAKTGIPHISTGDILRQIVAKQNDEVASSIKEWMLKGELVPDEIGNPVVKRRLKEKDCEKGFILDGFPRTVRQAEYLDSFLESQGRQLTAAVLIEVPEDEVVARLLSGRVCPKCGRSYNMIFLPPKEDELCDDCGVSLVQRLDDKEETVRMRLKVYREKTQPVIDYYSKKGILARVDGSQEIMPIVAEVLGILGWSDK

SEQ ID NO: 2821 - DNA, 693 bp, synthetic construct
  misc_feature 1..693: note = variant of adenylate kinase from Thermotoga neapolitana
  source 1..693: mol_type = other DNA
atgcaccatcatcaccatcacgggggctccggcatgggggcatatctggtgttattaggtccgccgggcgcgggaaaaggtacccaaggccgtattatttcggcaaagactggcatcccgcatattagcacgggcgatatcctgcgtcagatcgtcgctaagcaaaacgatgaagttgcctcgagcattaaagagtggatgctgaaaggtgaactcgttccagatgaaattggtaatcctgtagtaaaacgccgcctgaaggagaaagactgcgaaaaaggctttattttggatggtttcccgcgtaccgtgcgccaagcggaatatctggatagttttcttgaaagccagggccgccagttgacagccgccgtgctgattgaggtccccgaagatgaagttgttgcactgctgctgtctcgccgtgtttgtccgaaatgcgggcgtagttacaacatgatttttctgccaccaaaagaagacgagctgtgtgacgattgcggtgtcagcttagtacagcgtttagatgataaggaagaaacggtccgtatgcgcctgaaagtctaccgtgagaagacccagccggtcattgactattatagtaagaaaggtattctcgcacgcgtagatgggagccaagaaatcatgcctatcgtggcagaagtcctggggattctgggttggagcgataag

SEQ ID NO: 2822 - protein, 231 aa, synthetic construct
  REGION 1..231: note = variant of adenylate kinase from Thermotoga neapolitana
MHHHHHHGGSGMGAYLVLLGPPGAGKGTQGRIISAKTGIPHISTGDILRQIVAKQNDEVASSIKEWMLKGELVPDEIGNPVVKRRLKEKDCEKGFILDGFPRTVRQAEYLDSFLESQGRQLTAAVLIEVPEDEVVALLLSRRVCPKCGRSYNMIFLPPKEDELCDDCGVSLVQRLDDKEETVRMRLKVYREKTQPVIDYYSKKGILARVDGSQEIMPIVAEVLGILGWSDK

SEQ ID NO: 2823 - DNA, 693 bp, synthetic construct
  misc_feature 1..693: note = variant of adenylate kinase from Thermotoga neapolitana
  source 1..693: mol_type = other DNA
atgcaccatcatcaccatcacgggggctccggcatgggggcatatctggtgttattaggtccgccgggcgcgggaaaaggtacccgtggccgtattatttcggcaaagactggcatcccgcatattagcacgggcgatatcctgcgtcagatcgtcgctaagcaaaacgatgaagttgcctcgagcattaaagagtggatgctgaaaggtgaactcgttccagatgaaattggtaatcctgtagtaaaacgccgcctgaaggagaaagactgcgaaaaaggctttattttggatggtttcccgcgtaccgtgcgccaagcggaatatctggatagttttcttgaaagccagggccgccagttgacagccgccgtgctgattgaggtccccgaagatgaagttgttgcacgtctgctgtctcgccgtgtttgtccgaaatgcgggcgtagttacaacatgatttttctgccaccaaaagaagacgagctgtgtgacgattgcggtgtcagcttagtacagcgtttagatgataaggaagaaacggtccgtatgcgcctgaaagtctaccgtgagaagacccagccggtcattgactattatagtaagaaaggtattctcgcacgcgtagatgggagccaagaaatcatgcctatcgtggcagaagtcctggggattctgggttggagcgataag

SEQ ID NO: 2824 - protein, 231 aa, synthetic construct
  REGION 1..231: note = variant of adenylate kinase from Thermotoga neapolitana
MHHHHHHGGSGMGAYLVLLGPPGAGKGTRGRIISAKTGIPHISTGDILRQIVAKQNDEVASSIKEWMLKGELVPDEIGNPVVKRRLKEKDCEKGFILDGFPRTVRQAEYLDSFLESQGRQLTAAVLIEVPEDEVVARLLSRRVCPKCGRSYNMIFLPPKEDELCDDCGVSLVQRLDDKEETVRMRLKVYREKTQPVIDYYSKKGILARVDGSQEIMPIVAEVLGILGWSDK

SEQ ID NO: 2825 - DNA, 693 bp, synthetic construct
  misc_feature 1..693: note = variant of adenylate kinase from Thermotoga neapolitana
  source 1..693: mol_type = other DNA
atgcaccatcatcaccatcacgggggctccggcatgggggcatatctggtgttattaggtccgccgggcgcgggaaaaggtacccaaggccgtattatttcggcaaagactggcatcccgcatattagcacgggcgatatcctgcgtcagatcgtcgctaagcaaaacgatgaagttgcctcgagcattaaagagtggatgctgaaaggtgaactcgttccagatgaaattggtaatcctgtagtaaaacgccgcctgaaggagaaagactgcgaaaaaggctttattttggatggtttcccgcgtaccgtcaagcaagcggaatatctggatagttttcttgaaagccagggccgccagttgacagccgccgtgctgctggaggtccccgaagatgaagttgttgtgcgtctgctgtctcgccgtgtttgtccgaaatgcgggcgtagttacaacatgatttttctgccaccaaaagaagacgagctgtgtgacgattgcggtgtcagtttagtacagcgtctggatgataaggaagaaacggtccgtatgcgcctgaaagtctaccgtgagaagacccagggggtcattgactattatagtaagaaaggtattctcgcacgcgtagatgggagccaagaaatcatgcctatcgtggcagaagtcctggggattctgggttggagcgataag

SEQ ID NO: 2826 - protein, 231 aa, synthetic construct
  REGION 1..231: note = variant of adenylate kinase from Thermotoga neapolitana
MHHHHHHGGSGMGAYLVLLGPPGAGKGTQGRIISAKTGIPHISTGDILRQIVAKQNDEVASSIKEWMLKGELVPDEIGNPVVKRRLKEKDCEKGFILDGFPRTVKQAEYLDSFLESQGRQLTAAVLLEVPEDEVVVRLLSRRVCPKCGRSYNMIFLPPKEDELCDDCGVSLVQRLDDKEETVRMRLKVYREKTQGVIDYYSKKGILARVDGSQEIMPIVAEVLGILGWSDK

SEQ ID NO: 2827 - DNA, 693 bp, synthetic construct
  misc_feature 1..693: note = variant of adenylate kinase from Thermotoga neapolitana
  source 1..693: mol_type = other DNA
atgcaccatcatcaccatcacgggggctccggcatgggggcatatctggtgttattaggtccgccgggcgcgggaaaaggtacccaaggccgtattatttcggcaaagactggcatcccgcatattagcacgggcgatatcctgcgtcagatcgtcgctaagcaaaacgatgaagttgcctcgagcattaaaacctggatgctgaaaggtgaactcgttccagatgaaattggtaatcctgtagtaaaacgccgcctgaaggagaaagactgcgaaaaaggctttattttggatggtttcccgcgtaccgtcaagcaagcggaatatctggatagttttcttgaaagccagggccgccagttgacagccgccgtgctgctggaggtccccgaagatgaagttgttgcacgtctgctgtctcgccgtgtttgtccgaaatgcgggcgtagttacaacatgatttttctgccaccaaaagaagacgagctgtgtgacgattgcggtgtcagtttagtacagcgtttcgatgataaggaagaaacggtccgtatgcgcctgaaagtctaccgtgagaagacccagccggtcattgactattatagtaagaaaggtattctcgcacgcgtagatgggagccaagaaatcatgcctatcgtggcagaagtcctggggattctgggttggagcgataag

SEQ ID NO: 2828 - protein, 231 aa, synthetic construct
  REGION 1..231: note = variant of adenylate kinase from Thermotoga neapolitana
MHHHHHHGGSGMGAYLVLLGPPGAGKGTQGRIISAKTGIPHISTGDILRQIVAKQNDEVASSIKTWMLKGELVPDEIGNPVVKRRLKEKDCEKGFILDGFPRTVKQAEYLDSFLESQGRQLTAAVLLEVPEDEVVARLLSRRVCPKCGRSYNMIFLPPKEDELCDDCGVSLVQRFDDKEETVRMRLKVYREKTQPVIDYYSKKGILARVDGSQEIMPIVAEVLGILGWSDK

SEQ ID NO: 2829 - DNA, 693 bp, synthetic construct
  misc_feature 1..693: note = variant of adenylate kinase from Thermotoga neapolitana
  source 1..693: mol_type = other DNA
atgcaccatcatcaccatcacgggggctccggcatgggggcatatctggtgttattaggtccgccgggcgcgggaaaaggtacccaaggccgtattatttcggcaaagactggcatcccgcatattagcacgggcgatatcctgcgtcagatcgtcgctaagcaaaacgatgaagttgcctcgagcattaaaacctggatgctgaaaggtgaactcgttccagatgaaattggtaatcctgtagtaaaacgccgcctgaaggagaaagactgcgaaaaaggctttattttggatggtttcccgcgtaccgtccgtcaagcggaatatctggatagttttcttgaaagccagggccgccagttgacagccgccgtgctgctggaggtccccgaagatgaagttgttgcacgtctgctgtctcgccgtgtttgtccgaaatgcgggcgtagttacaacatgatttttctgccaccaaaagaagacgagctgtgtgacgattgcggtgtccgtttagtacagcgtctggatgataaggaagaaacggtccgtatgcgcctgaaagtctaccgtgagaagacccagccggtcattgactattatagtaagaaaggtattctcgcacgcgtagatgggagccaagaaatcatgcctatcgtggcagaagtcctggggattctgggttggagcgataag

SEQ ID NO: 2830 - protein, 231 aa, synthetic construct
  REGION 1..231: note = variant of adenylate kinase from Thermotoga neapolitana
MHHHHHHGGSGMGAYLVLLGPPGAGKGTQGRIISAKTGIPHISTGDILRQIVAKQNDEVASSIKTWMLKGELVPDEIGNPVVKRRLKEKDCEKGFILDGFPRTVRQAEYLDSFLESQGRQLTAAVLLEVPEDEVVARLLSRRVCPKCGRSYNMIFLPPKEDELCDDCGVRLVQRLDDKEETVRMRLKVYREKTQPVIDYYSKKGILARVDGSQEIMPIVAEVLGILGWSDK

SEQ ID NO: 2831 - DNA, 693 bp, synthetic construct
  misc_feature 1..693: note = variant of adenylate kinase from Thermotoga neapolitana
  source 1..693: mol_type = other DNA
atgcaccatcatcaccatcacgggggctccggcatgggggcatatctggtgttattaggtccgccgggcgcgggaaaaggtacccaaggccgtattatttcggcaaagactggcatcccgcatattagcacgggcgatatcctgcgtcagatcgtcgctaagcaaaacgatgaagttgcctcgagcattaaagaatggatgctgaaaggtgaactcgttccagatgaaattggtaatcctgtagtaaaacgccgcctgaaggagaaagactgcgaaaaaggctttattttggatggtttcccgcgtaccgcccgtcaagcggaatatctggatagttttcttgaatcgcagggccgccagttgacagccgccgtgctgctggaggtccccgaagatgaagttgttgtgcgtctgctgtctcgccgtgtttgtccgaaatgcgggcgtagttacaacatgatttttctgccaccaaaagaagacgagctgtgtgacgattgcggtgtcagtttagtacagcgtttcgatgataaggaagaaacggtccgtatgcgcctgaaagtctaccgtgagaagacccagccggtcattgactattatagtaagaaaggtattctcgcacgcgtagatgggagccaagaaatcatgcctatcgtggcagaagtcctggggattctgggttggagcgataag

SEQ ID NO: 2832 - protein, 231 aa, synthetic construct
  REGION 1..231: note = variant of adenylate kinase from Thermotoga neapolitana
MHHHHHHGGSGMGAYLVLLGPPGAGKGTQGRIISAKTGIPHISTGDILRQIVAKQNDEVASSIKEWMLKGELVPDEIGNPVVKRRLKEKDCEKGFILDGFPRTARQAEYLDSFLESQGRQLTAAVLLEVPEDEVVVRLLSRRVCPKCGRSYNMIFLPPKEDELCDDCGVSLVQRFDDKEETVRMRLKVYREKTQPVIDYYSKKGILARVDGSQEIMPIVAEVLGILGWSDK

SEQ ID NO: 2833 - DNA, 693 bp, synthetic construct
  misc_feature 1..693: note = variant of adenylate kinase from Thermotoga neapolitana
  source 1..693: mol_type = other DNA
atgcaccatcatcaccatcacgggggctccggcatgggggcatatctggtgttattaggtccgccgggcgcgggaaaaggtacccaaggccgtattatttcggcaaagactggcatcccgcatattagcacgggcgatatcctgcgtcagatcgtcgctaagcaaaacgatgaagttgcctcgagcattaaaacctggatgctgaaaggtgaactcgttccagatgaaattggtaatcctgtagtaaaacgccgcctgaaggagaaagactgcgaaaaaggctttattttggatggtttcccgcgtaccgcccgtcaagcggaatatctggatagttttcttgaaagccagggccgccagttgacagccgccgtgctgattgaggtccccgaagatgaagttgttgtgcgtctgctgtctcgccgtgtttgtccgaaatgcgggcgtagttacaacatgatttttctgccaccaaaagaagacgagctgtgtgacgattgcggtgtcagtttagtacagcgtctggatgataaggaagaaacggtccgtatgcgcctgaaagtctaccgtgagaagacccagccggtcattgactattatagtaagaaaggtattctcgcacgcgtagatgggagccaagaaatcatgcctatcgtggcagaagtcctggggattctgggttggagcgataag

SEQ ID NO: 2834 - protein, 231 aa, synthetic construct
  REGION 1..231: note = variant of adenylate kinase from Thermotoga neapolitana
MHHHHHHGGSGMGAYLVLLGPPGAGKGTQGRIISAKTGIPHISTGDILRQIVAKQNDEVASSIKTWMLKGELVPDEIGNPVVKRRLKEKDCEKGFILDGFPRTARQAEYLDSFLESQGRQLTAAVLIEVPEDEVVVRLLSRRVCPKCGRSYNMIFLPPKEDELCDDCGVSLVQRLDDKEETVRMRLKVYREKTQPVIDYYSKKGILARVDGSQEIMPIVAEVLGILGWSDK

SEQ ID NO: 2835 - DNA, 693 bp, synthetic construct
  misc_feature 1..693: note = variant of adenylate kinase from Thermotoga neapolitana
  source 1..693: mol_type = other DNA
atgcaccatcatcaccatcacgggggctccggcatgggggcatatctggtgttattaggtccgccgggcgcgggaaaaggtacccaaggccgtattatttcggcaaagactggcatcccgcatattagcacgggcgatatcctgcgtcagatcgtcgctaagcaaaacgatgaagttgcctcgagcattaaaacctggatgctgaaaggtgaactcgttccagatgaaattggtaatcctgtagtaaaacgccgcctgaaggagaaagactgcgaaaaaggctttattttggatggtttcccgcgtaccgtcaagcaagcggaatatctggatagttttcttgaaagccagggccgccagttgacagccgccgtgctgctggaggtccccgaagatgaagttgttgtgcgtctgctgtctcgccgtgtttgtccgaaatgcgggcgtagttacaacatgatttttctgccaccaaaagaagacgagctgtgtgacgattgcggtgtcagtttagtacagcgtctggatgataaggaagaaacggtccgtatgcgcctgaaagtctaccgtgagaagacccagccggtcattgactattatagtaagaaaggtattctcgcacgcgtagatgggagccaagaaatcatgcctatcgtggcagaagtcctggggattctgggttggagcgataag

SEQ ID NO: 2836 - protein, 231 aa, synthetic construct
  REGION 1..231: note = variant of adenylate kinase from Thermotoga neapolitana
MHHHHHHGGSGMGAYLVLLGPPGAGKGTQGRIISAKTGIPHISTGDILRQIVAKQNDEVASSIKTWMLKGELVPDEIGNPVVKRRLKEKDCEKGFILDGFPRTVKQAEYLDSFLESQGRQLTAAVLLEVPEDEVVVRLLSRRVCPKCGRSYNMIFLPPKEDELCDDCGVSLVQRLDDKEETVRMRLKVYREKTQPVIDYYSKKGILARVDGSQEIMPIVAEVLGILGWSDK

SEQ ID NO: 2837 - DNA, 693 bp, synthetic construct
  misc_feature 1..693: note = variant of adenylate kinase from Thermotoga neapolitana
  source 1..693: mol_type = other DNA
atgcaccatcatcaccatcacgggggctccggcatgggggcatatctggtgttattaggtccgccgggcgcgggaaaaggtacccaaggccgtattatttcggcaaagactggcatcccgcatattagcacgggcgatatcctgcgtcagatcgtcgctaagcaaaacgatgaagttgcctcgagcattaaagaatggatgctgaaaggtgaactcgttccagatgaaattggtaatcctgtagtaaaacgccgcctgaaggagaaagactgcgaaaaaggctttattttggatggtttcccgcgtaccgccaagcaagcggaatatctggatagttttcttgaaagccagggccgccagttgacagccgccgtgctgctggaggtccccgaagatgaagttgttgtgcgtctgctgtctcgccgtgtttgtccgaaatgcgggcgtagttacaacatgatttttctgccaccaaaagaagacgagctgtgtgacgattgcggtgtcagtttagtacagcgtttcgatgataaggaagaaacggtccgtatgcgcctgaaagtctaccgtgagaagacccagggggtcattgactattatagtaagaaaggtattctcgcacgcgtagatgggagccaagaaatcatgcctatcgtggcagaagtcctggggattctgggttggagcgataag

SEQ ID NO: 2838 - protein, 231 aa, synthetic construct
  REGION 1..231: note = variant of adenylate kinase from Thermotoga neapolitana
MHHHHHHGGSGMGAYLVLLGPPGAGKGTQGRIISAKTGIPHISTGDILRQIVAKQNDEVASSIKEWMLKGELVPDEIGNPVVKRRLKEKDCEKGFILDGFPRTAKQAEYLDSFLESQGRQLTAAVLLEVPEDEVVVRLLSRRVCPKCGRSYNMIFLPPKEDELCDDCGVSLVQRFDDKEETVRMRLKVYREKTQGVIDYYSKKGILARVDGSQEIMPIVAEVLGILGWSDK

SEQ ID NO: 2839 - DNA, 693 bp, synthetic construct
  misc_feature 1..693: note = variant of adenylate kinase from Thermotoga neapolitana
  source 1..693: mol_type = other DNA
atgcaccatcatcaccatcacgggggctccggcatgggggcatatctggtgttattaggtccgccgggcgcgggaaaaggtacccaaggccgtattatttcggcaaagactggcatcccgcatattagcacgggcgatatcctgcgtcagatcgtcgctaagcaaaacgatgaagttgcctcgagcattaaaacctggatgctgaaaggtgaactcgttccagatgaaattggtaatcctgtagtaaaacgccgcctgaaggagaaagactgcgaaaaaggctttattttggatggtttcccgcgtaccgcccgtcaagcggaatatctggatagttttcttgaaagccagggccgccagttgacagccgccgtgctgattgaggtccccgaagatgaagttgttgtgcgtctgctgtctcgccgtgtttgtccgaaatgcgggcgtagttacaacatgatttttctgccaccaaaagaagacgagctgtgtgacgattgcggtgtccgtttagtacagcgtctggatgataaggaagaaacggtccgtatgcgcctgaaagtctaccgtgagaagacccagccggtcattgactattatagtaagaaaggtattctcgcacgcgtagatgggagccaagaaatcatgcctatcgtggcagaagtcctggggattctgggttggagcgataag

SEQ ID NO: 2840 - protein, 231 aa, synthetic construct
  REGION 1..231: note = variant of adenylate kinase from Thermotoga neapolitana
MHHHHHHGGSGMGAYLVLLGPPGAGKGTQGRIISAKTGIPHISTGDILRQIVAKQNDEVASSIKTWMLKGELVPDEIGNPVVKRRLKEKDCEKGFILDGFPRTARQAEYLDSFLESQGRQLTAAVLIEVPEDEVVVRLLSRRVCPKCGRSYNMIFLPPKEDELCDDCGVRLVQRLDDKEETVRMRLKVYREKTQPVIDYYSKKGILARVDGSQEIMPIVAEVLGILGWSDK

SEQ ID NO: 2841 - DNA, 693 bp, synthetic construct
  misc_feature 1..693: note = variant of adenylate kinase from Thermotoga neapolitana
  source 1..693: mol_type = other DNA
atgcaccatcatcaccatcacgggggctccggcatgggggcatatctggtgttattaggtccgccgggcgcgggaaaaggtacccaaggccgtattatttcggcaaagactggcatcccgcatattagcacgggcgatatcctgcgtcagatcgtcgctaagcaaaacgatgaagttgcctcgagcattaaagagtggatgctgaaaggtgaactcgttccagatgaaattggtaatcctgtagtaaaacgccgcctgaaggagaaagactgcgaaaaaggctttattttggatggtttcccgcgtaccgtcaagcaagcggaatatctggatagttttcttgaagcgcagggccgccagttgacagccgccgtgctgctggaggtccccgaagatgaagttgtttaccgtctgctgtctcgccgtgtttgtccgaaatgcgggcgtagttacaacatgatttttctgccaccaaaagaagacgagctgtgtgacgattgcggtgtccgtttagtacagcgtttcgatgataaggaagaaacggtccgtatgcgcctgaaagtctaccgtgagaagacccagccggtcattgactattatagtaagaaaggtattctcgcacgcgtagatgggagccaagaaatcatgcctatcgtggcagaagtcctggggattctgggttggagcgataag

SEQ ID NO: 2842 - protein, 231 aa, synthetic construct
  REGION 1..231: note = variant of adenylate kinase from Thermotoga neapolitana
MHHHHHHGGSGMGAYLVLLGPPGAGKGTQGRIISAKTGIPHISTGDILRQIVAKQNDEVASSIKEWMLKGELVPDEIGNPVVKRRLKEKDCEKGFILDGFPRTVKQAEYLDSFLEAQGRQLTAAVLLEVPEDEVVYRLLSRRVCPKCGRSYNMIFLPPKEDELCDDCGVRLVQRFDDKEETVRMRLKVYREKTQPVIDYYSKKGILARVDGSQEIMPIVAEVLGILGWSDK

SEQ ID NO: 2843 - DNA, 693 bp, synthetic construct
  misc_feature 1..693: note = variant of adenylate kinase from Thermotoga neapolitana
  source 1..693: mol_type = other DNA
atgcaccatcatcaccatcacgggggctccggcatgggggcatatctggtgttattaggtccgccgggcgcgggaaaaggtacccaaggccgtattatttcggcaaagactggcatcccgcatattagcacgggcgatatcctgcgtcagatcgtcgctaagcaaaacgatgaagttgcctcgagcattaaaacctggatgctgaaaggtgaactcgttccagatgaaattggtaatcctgtagtaaaacgccgcctgaaggagaaagactgcgaaaaaggctttattttggatggtttcccgcgtaccgtccgtcaagcggaatatctggatagttttcttgaaagccagggccgccagttgacagccgccgtgctgatcgaggtccccgaagatgaagttgttgcgcgtctgctgtctcgccgtgtttgtccgaaatgcgggcgtagttacaacatgatttttctgccaccaaaagaagacgagctgtgtgacgattgcggtgtcagtttagtacagcgtctggatgataaggaagaaacggtccgtatgcgcctgaaagtctaccgtgagaagacccagccggtcattgactattatagtaagaaaggtattctcgcacgcgtagatgggagccaagaaatcatgcctatcgtggcagaagtcctggggattctgggttggagcgataag

SEQ ID NO: 2844 - protein, 231 aa, synthetic construct
  REGION 1..231: note = variant of adenylate kinase from Thermotoga neapolitana
MHHHHHHGGSGMGAYLVLLGPPGAGKGTQGRIISAKTGIPHISTGDILRQIVAKQNDEVASSIKTWMLKGELVPDEIGNPVVKRRLKEKDCEKGFILDGFPRTVRQAEYLDSFLESQGRQLTAAVLIEVPEDEVVARLLSRRVCPKCGRSYNMIFLPPKEDELCDDCGVSLVQRLDDKEETVRMRLKVYREKTQPVIDYYSKKGILARVDGSQEIMPIVAEVLGILGWSDK

SEQ ID NO: 2845 - DNA, 693 bp, synthetic construct
  misc_feature 1..693: note = variant of adenylate kinase from Thermotoga neapolitana
  source 1..693: mol_type = other DNA
atgcaccatcatcaccatcacgggggctccggcatgggggcatatctggtgttattaggtccgccgggcgcgggaaaaggtacccaaggccgtattatttcggcaaagactggcatcccgcatattagcacgggcgatatcctgcgtcagatcgtcgctaagcaaaacgatgaagttgcctcgagcattaaaacctggatgctgaaaggtgaactcgttccagatgaaattggtaatcctgtagtaaaacgccgcctgaaggagaaagactgcgaaaaaggctttattttggatggtttcccgcgtaccgtcaagcaagcggaatatctggatagttttcttgaaagccagggccgccagttgacagccgccgtgctgctggaggtccccgaagatgaagttgttgcgcgtctgctgtctcgccgtgtttgtccgaaatgcgggcgtagttacaacatgatttttctgccaccaaaagaagacgagctgtgtgacgattgcggtgtccgtttagtacagcgtctggatgataaggaagaaacggtccgtatgcgcctgaaagtctaccgtgagaagacccagccggtcattgactattatagtaagaaaggtattctcgcacgcgtagatgggagccaagaaatcatgcctatcgtggcagaagtcctggggattctgggttggagcgataag

SEQ ID NO: 2846 - protein, 231 aa, synthetic construct
  REGION 1..231: note = variant of adenylate kinase from Thermotoga neapolitana
MHHHHHHGGSGMGAYLVLLGPPGAGKGTQGRIISAKTGIPHISTGDILRQIVAKQNDEVASSIKTWMLKGELVPDEIGNPVVKRRLKEKDCEKGFILDGFPRTVKQAEYLDSFLESQGRQLTAAVLLEVPEDEVVARLLSRRVCPKCGRSYNMIFLPPKEDELCDDCGVRLVQRLDDKEETVRMRLKVYREKTQPVIDYYSKKGILARVDGSQEIMPIVAEVLGILGWSDK

SEQ ID NO: 2847 - DNA, 693 bp, synthetic construct
  misc_feature 1..693: note = variant of adenylate kinase from Thermotoga neapolitana
  source 1..693: mol_type = other DNA
atgcaccatcatcaccatcacgggggctccggcatgggggcatatctggtgttattaggtccgccgggcgcgggaaaaggtacccaaggccgtattatttcggcaaagactggcatcccgcatattagcacgggcgatatcctgcgtcagatcgtcgctaagcaaaacgatgaagttgcctcgagcattaaaacctggatgctgaaaggtgaactcgttccagatgaaattggtaatcctgtagtaaaacgccgcctgaaggagaaagactgcgaaaaaggctttattttggatggtttcccgcgtaccgtcaagcaagcggaatatctggatagttttcttgaaagccagggccgccagttgacagccgccgtgctgatcgaggtccccgaagatgaagttgttgtgcgtctgctgtctcgccgtgtttgtccgaaatgcgggcgtagttacaacatgatttttctgccaccaaaagaagacgagctgtgtgacgattgcggtgtcagcttagtacagcgtctggatgataaggaagaaacggtccgtatgcgcctgaaagtctaccgtgagaagacccagccggtcattgactattatagtaagaaaggtattctcgcacgcgtagatgggagccaagaaatcatgcctatcgtggcagaagtcctggggattctgggttggagcgataag

SEQ ID NO: 2848 - protein, 231 aa, synthetic construct
  REGION 1..231: note = variant of adenylate kinase from Thermotoga neapolitana
MHHHHHHGGSGMGAYLVLLGPPGAGKGTQGRIISAKTGIPHISTGDILRQIVAKQNDEVASSIKTWMLKGELVPDEIGNPVVKRRLKEKDCEKGFILDGFPRTVKQAEYLDSFLESQGRQLTAAVLIEVPEDEVVVRLLSRRVCPKCGRSYNMIFLPPKEDELCDDCGVSLVQRLDDKEETVRMRLKVYREKTQPVIDYYSKKGILARVDGSQEIMPIVAEVLGILGWSDK

SEQ ID NO: 2849 - DNA, 693 bp, synthetic construct
  misc_feature 1..693: note = variant of adenylate kinase from Thermotoga neapolitana
  source 1..693: mol_type = other DNA
atgcaccatcatcaccatcacgggggctccggcatgggggcatatctggtgttattaggtccgccgggcgcgggaaaaggtacccaaggccgtattatttcggcaaagactggcatcccgcatattagcacgggcgatatcctgcgtcagatcgtcgctaagcaaaacgatgaagttgcctcgagcattaaaacctggatgctgaaaggtgaactcgttccagatgaaattggtaatcctgtagtaaaacgccgcctgaaggagaaagactgcgaaaaaggctttattttggatggtttcccgcgtaccgccaagcaagcggaatatctggatagttttcttgaagcgcagggccgccagttgacagccgccgtgctgctggaggtccccgaagatgaagttgttgcgcgtctgctgtctcgccgtgtttgtccgaaatgcgggcgtagttacaacatgatttttctgccaccaaaagaagacgagctgtgtgacgattgcggtgtcagcttagtacagcgtttagatgataaggaagaaacggtccgtatgcgcctgaaagtctaccgtgagaagacccagccggtcattgactattatagtaagaaaggtattctcgcacgcgtagatgggagccaagaaatcatgcctatcgtggcagaagtcctggggattctgggttggagcgataag

SEQ ID NO: 2850 - protein, 231 aa, synthetic construct
  REGION 1..231: note = variant of adenylate kinase from Thermotoga neapolitana
MHHHHHHGGSGMGAYLVLLGPPGAGKGTQGRIISAKTGIPHISTGDILRQIVAKQNDEVASSIKTWMLKGELVPDEIGNPVVKRRLKEKDCEKGFILDGFPRTAKQAEYLDSFLEAQGRQLTAAVLLEVPEDEVVARLLSRRVCPKCGRSYNMIFLPPKEDELCDDCGVSLVQRLDDKEETVRMRLKVYREKTQPVIDYYSKKGILARVDGSQEIMPIVAEVLGILGWSDK

SEQ ID NO: 2851 - DNA, 693 bp, synthetic construct
  misc_feature 1..693: note = variant of adenylate kinase from Thermotoga neapolitana
  source 1..693: mol_type = other DNA
atgcaccatcatcaccatcacgggggctccggcatgggggcatatctggtgttattaggtccgccgggcgcgggaaaaggtacccaaggccgtattatttcggcaaagactggcatcccgcatattagcacgggcgatatcctgcgtcagatcgtcgctaagcaaaacgatgaagttgcctcgagcattaaagagtggatgctgaaaggtgaactcgttccagatgaaattggtaatcctgtagtaaaacgccgcctgaaggagaaagactgcgaaaaaggctttattttggatggtttcccgcgtaccgtcaagcaagcggaatatctggatagttttcttgaatcgcagggccgccagttgacagccgccgtgctgatcgaggtccccgaagatgaagttgttgcacgtctgctgtctcgccgtgtttgtccgaaatgcgggcgtagttacaacatgatttttctgccaccaaaagaagacgagctgtgtgacgattgcggtgtcagtttagtacagcgtctggatgataaggaagaaacggtccgtatgcgcctgaaagtctaccgtgagaagacccagccggtcattgactattatagtaagaaaggtattctcgcacgcgtagatgggagccaagaaatcatgcctatcgtggcagaagtcctggggattctgggttggagcgataag

SEQ ID NO: 2852 - protein, 231 aa, synthetic construct
  REGION 1..231: note = variant of adenylate kinase from Thermotoga neapolitana
MHHHHHHGGSGMGAYLVLLGPPGAGKGTQGRIISAKTGIPHISTGDILRQIVAKQNDEVASSIKEWMLKGELVPDEIGNPVVKRRLKEKDCEKGFILDGFPRTVKQAEYLDSFLESQGRQLTAAVLIEVPEDEVVARLLSRRVCPKCGRSYNMIFLPPKEDELCDDCGVSLVQRLDDKEETVRMRLKVYREKTQPVIDYYSKKGILARVDGSQEIMPIVAEVLGILGWSDK

SEQ ID NO: 2853 - DNA, 693 bp, synthetic construct
  misc_feature 1..693: note = variant of adenylate kinase from Thermotoga neapolitana
  source 1..693: mol_type = other DNA
atgcaccatcatcaccatcacgggggctccggcatgggggcatatctggtgttattaggtccgccgggcgcgggaaaaggtacccaaggccgtattatttcggcaaagactggcatcccgcatattagcacgggcgatatcctgcgtcagatcgtcgctaagcaaaacgatgaagttgcctcgagcattaaaacctggatgctgaaaggtgaactcgttccagatgaaattggtaatcctgtagtaaaacgccgcctgaaggagaaagactgcgaaaaaggctttattttggatggtttcccgcgtaccgccaagcaagcggaatatctggatagttttcttgaatcgcagggccgccagttgacagccgccgtgctgctggaggtccccgaagatgaagttgttgtgcgtctgctgtctcgccgtgtttgtccgaaatgcgggcgtagttacaacatgatttttctgccaccaaaagaagacgagctgtgtgacgattgcggtgtcagtttagtacagcgtctggatgataaggaagaaacggtccgtatgcgcctgaaagtctaccgtgagaagacccagccggtcattgactattatagtaagaaaggtattctcgcacgcgtagatgggagccaagaaatcatgcctatcgtggcagaagtcctggggattctgggttggagcgataag

SEQ ID NO: 2854 - protein, 231 aa, synthetic construct
  REGION 1..231: note = variant of adenylate kinase from Thermotoga neapolitana
MHHHHHHGGSGMGAYLVLLGPPGAGKGTQGRIISAKTGIPHISTGDILRQIVAKQNDEVASSIKTWMLKGELVPDEIGNPVVKRRLKEKDCEKGFILDGFPRTAKQAEYLDSFLESQGRQLTAAVLLEVPEDEVVVRLLSRRVCPKCGRSYNMIFLPPKEDELCDDCGVSLVQRLDDKEETVRMRLKVYREKTQPVIDYYSKKGILARVDGSQEIMPIVAEVLGILGWSDK

SEQ ID NO: 2855 - DNA, 693 bp, synthetic construct
  misc_feature 1..693: note = variant of adenylate kinase from Thermotoga neapolitana
  source 1..693: mol_type = other DNA
atgcaccatcatcaccatcacgggggctccggcatgggggcatatctggtgttattaggtccgccgggcgcgggaaaaggtacccaaggccgtattatttcggcaaagactggcatcccgcatattagcacgggcgatatcctgcgtcagatcgtcgctaagcaaaacgatgaagttgcctcgagcattaaagaatggatgctgaaaggtgaactcgttccagatgaaattggtaatcctgtagtaaaacgccgcctgaaggagaaagactgcgaaaaaggctttattttggatggtttcccgcgtaccgcccgtcaagcggaatatctggatagttttcttgaaagccagggccgccagttgacagccgccgtgctgctggaggtccccgaagatgaagttgttgtgcgtctgctgtctcgccgtgtttgtccgaaatgcgggcgtagttacaacatgatttttctgccaccaaaagaagacgagctgtgtgacgattgcggtgtccgtttagtacagcgtctggatgataaggaagaaacggtccgtatgcgcctgaaagtctaccgtgagaagacccagccggtcattgactattatagtaagaaaggtattctcgcacgcgtagatgggagccaagaaatcatgcctatcgtggcagaagtcctggggattctgggttggagcgataag

SEQ ID NO: 2856 - protein, 231 aa, synthetic construct
  REGION 1..231: note = variant of adenylate kinase from Thermotoga neapolitana
MHHHHHHGGSGMGAYLVLLGPPGAGKGTQGRIISAKTGIPHISTGDILRQIVAKQNDEVASSIKEWMLKGELVPDEIGNPVVKRRLKEKDCEKGFILDGFPRTARQAEYLDSFLESQGRQLTAAVLLEVPEDEVVVRLLSRRVCPKCGRSYNMIFLPPKEDELCDDCGVRLVQRLDDKEETVRMRLKVYREKTQPVIDYYSKKGILARVDGSQEIMPIVAEVLGILGWSDK

SEQ ID NO: 2857 - DNA, 693 bp, synthetic construct
  misc_feature 1..693: note = variant of adenylate kinase from Thermotoga neapolitana
  source 1..693: mol_type = other DNA
atgcaccatcatcaccatcacgggggctccggcatgggggcatatctggtgttattaggtccgccgggcgcgggaaaaggtacccaaggccgtattatttcggcaaagactggcatcccgcatattagcacgggcgatatcctgcgtcagatcgtcgctaagcaaaacgatgaagttgcctcgagcattaaagagtggatgctgaaaggtgaactcgttccagatgaaattggtaatcctgtagtaaaacgccgcctgaaggagaaagactgcgaaaaaggctttattttggatggtttcccgcgtaccgccaagcaagcggaatatctggatagttttcttgaaagccagggccgccagttgacagccgccgtgctgatcgaggtccccgaagatgaagttgttgtgcgtctgctgtctcgccgtgtttgtccgaaatgcgggcgtagttacaacatgatttttctgccaccaaaagaagacgagctgtgtgacgattgcggtgtccgtttagtacagcgtctggatgataaggaagaaacggtccgtatgcgcctgaaagtctaccgtgagaagacccagccggtcattgactattatagtaagaaaggtattctcgcacgcgtagatgggagccaagaaatcatgcctatcgtggcagaagtcctggggattctgggttggagcgataag

SEQ ID NO: 2858 - protein, 231 aa, synthetic construct
  REGION 1..231: note = variant of adenylate kinase from Thermotoga neapolitana
MHHHHHHGGSGMGAYLVLLGPPGAGKGTQGRIISAKTGIPHISTGDILRQIVAKQNDEVASSIKEWMLKGELVPDEIGNPVVKRRLKEKDCEKGFILDGFPRTAKQAEYLDSFLESQGRQLTAAVLIEVPEDEVVVRLLSRRVCPKCGRSYNMIFLPPKEDELCDDCGVRLVQRLDDKEETVRMRLKVYREKTQPVIDYYSKKGILARVDGSQEIMPIVAEVLGILGWSDK

SEQ ID NO: 2859 - DNA, 693 bp, synthetic construct
  misc_feature 1..693: note = variant of adenylate kinase from Thermotoga neapolitana
  source 1..693: mol_type = other DNA
atgcaccatcatcaccatcacgggggctccggcatgggggcatatctggtgttattaggtccgccgggcgcgggaaaaggtacccaaggccgtattatttcggcaaagactggcatcccgcatattagcacgggcgatatcctgcgtcagatcgtcgctaagcaaaacgatgaagttgcctcgagcattaaagagtggatgctgaaaggtgaactcgttccagatgaaattggtaatcctgtagtaaaacgccgcctgaaggagaaagactgcgaaaaaggctttattttggatggtttcccgcgtaccgtgcgccaagcggaatatctggatagttttcttgaaagccagggccgccagttgacagccgccgtgctgattgaggtccccgaaaaagaagttgttgcacgtctgctgtctcgccgtgtttgtccgaaatgcgggcgtagttacaacatgatttttctgccaccaaaagaagacgagctgtgtgacgattgcggtgtcagcttagtacagcgtttagatgataaggaagaaacggtccgtatgcgcctgaaagtctaccgtgagaagacccagccggtcattgactattatagtaagaaaggtattctcgcacgcgtagatgggagccaagaaatcatgcctatcgtggcagaagtcctggggattctgggttggagcgataag

SEQ ID NO: 2860 - protein, 231 aa, synthetic construct
  REGION 1..231: note = variant of adenylate kinase from Thermotoga neapolitana
MHHHHHHGGSGMGAYLVLLGPPGAGKGTQGRIISAKTGIPHISTGDILRQIVAKQNDEVASSIKEWMLKGELVPDEIGNPVVKRRLKEKDCEKGFILDGFPRTVRQAEYLDSFLESQGRQLTAAVLIEVPEKEVVARLLSRRVCPKCGRSYNMIFLPPKEDELCDDCGVSLVQRLDDKEETVRMRLKVYREKTQPVIDYYSKKGILARVDGSQEIMPIVAEVLGILGWSDK

SEQ ID NO: 2861 - DNA, 693 bp, synthetic construct
  misc_feature 1..693: note = variant of adenylate kinase from Thermotoga neapolitana
  source 1..693: mol_type = other DNA
atgcaccatcatcaccatcacgggggctccggcatgggggcatatctggtgttattaggtccgccgggcgcgggaaaaggtacccaaggccgtattatttcggcaaagactggcatcccgcatattagcacgggcgatatcctgcgtcagatcgtcgctaagcaaaacgatgaagttgcctcgagcattaaaacctggatgctgaaaggtgaactcgttccagatgaaattggtaatcctgtagtaaaacgccgcctgaaggagaaagactgcgaaaaaggctttattttggatggtttcccgcgtaccgcccgtcaagcggaatatctggatagttttcttgaaagccagggccgccagttgacagccgccgtgctgatcgaggtccccgaagatgaagttgttgcacgtctgctgtctcgccgtgtttgtccgaaatgcgggcgtagttacaacatgatttttctgccaccaaaagaagacgagctgtgtgacgattgcggtgtcagtttagtacagcgtctggatgataaggaagaaacggtccgtatgcgcctgaaagtctaccgtgagaagacccagccggtcattgactattatagtaagaaaggtattctcgcacgcgtagatgggagccaagaaatcatgcctatcgtggcagaagtcctggggattctgggttggagcgataag

SEQ ID NO: 2862 - protein, 231 aa, synthetic construct
  REGION 1..231: note = variant of adenylate kinase from Thermotoga neapolitana
MHHHHHHGGSGMGAYLVLLGPPGAGKGTQGRIISAKTGIPHISTGDILRQIVAKQNDEVASSIKTWMLKGELVPDEIGNPVVKRRLKEKDCEKGFILDGFPRTARQAEYLDSFLESQGRQLTAAVLIEVPEDEVVARLLSRRVCPKCGRSYNMIFLPPKEDELCDDCGVSLVQRLDDKEETVRMRLKVYREKTQPVIDYYSKKGILARVDGSQEIMPIVAEVLGILGWSDK

SEQ ID NO: 2863 - DNA, 693 bp, synthetic construct
  misc_feature 1..693: note = variant of adenylate kinase from Thermotoga neapolitana
  source 1..693: mol_type = other DNA
atgcaccatcatcaccatcacgggggctccggcatgggggcatatctggtgttattaggtccgccgggcgcgggaaaaggtacccaaggccgtattatttcggcaaagactggcatcccgcatattagcacgggcgatatcctgcgtcagatcgtcgctaagcaaaacgatgaagttgcctcgagcattaaagaatggatgctgaaaggtgaactcgttccagatgaaattggtaatcctgtagtaaaacgccgcctgaaggagaaagactgcgaaaaaggctttattttggatggtttcccgcgtaccgtcaagcaagcggaatatctggatagttttcttgaaagccagggccgccagttgacagccgccgtgctgatcgaggtccccgaagatgaagttgttgtgcgtctgctgtctcgccgtgtttgtccgaaatgcgggcgtagttacaacatgatttttctgccaccaaaagaagacgagctgtgtgacgattgcggtgtcagtttagtacagcgtctggatgataaggaagaaacggtccgtatgcgcctgaaagtctaccgtgagaagacccagggggtcattgactattatagtaagaaaggtattctcgcacgcgtagatgggagccaagaaatcatgcctatcgtggcagaagtcctggggattctgggttggagcgataag

SEQ ID NO: 2864 - protein, 231 aa, synthetic construct
  REGION 1..231: note = variant of adenylate kinase from Thermotoga neapolitana
MHHHHHHGGSGMGAYLVLLGPPGAGKGTQGRIISAKTGIPHISTGDILRQIVAKQNDEVASSIKEWMLKGELVPDEIGNPVVKRRLKEKDCEKGFILDGFPRTVKQAEYLDSFLESQGRQLTAAVLIEVPEDEVVVRLLSRRVCPKCGRSYNMIFLPPKEDELCDDCGVSLVQRLDDKEETVRMRLKVYREKTQGVIDYYSKKGILARVDGSQEIMPIVAEVLGILGWSDK

SEQ ID NO: 2865 - DNA, 693 bp, synthetic construct
  misc_feature 1..693: note = variant of adenylate kinase from Thermotoga neapolitana
  source 1..693: mol_type = other DNA
atgcaccatcatcaccatcacgggggctccggcatgggggcatatctggtgttattaggtccgccgggcgcgggaaaaggtacccaaggccgtattatttcggcaaagactggcatcccgcatattagcacgggcgatatcctgcgtcagatcgtcgctaagcaaaacgatgaagttgcctcgagcattaaagagtggatgctgaaaggtgaactcgttccagatgaaattggtaatcctgtagtaaaacgccgcctgaaggagaaagactgcgaaaaaggctttattttggatggtttcccgcgtaccgcccgtcaagcggaatatctggatagttttcttgaaagccagggccgccagttgacagccgccgtgctgctggaggtccccgaagatgaagttgttgcacgtctgctgtctcgccgtgtttgtccgaaatgcgggcgtagttacaacatgatttttctgccaccaaaagaagacgagctgtgtgacgattgcggtgtcagcttagtacagcgtctggatgataaggaagaaacggtccgtatgcgcctgaaagtctaccgtgagaagacccagccggtcattgactattatagtaagaaaggtattctcgcacgcgtagatgggagccaagaaatcatgcctatcgtggcagaagtcctggggattctgggttggagcgataag

SEQ ID NO: 2866 - protein, 231 aa, synthetic construct
  REGION 1..231: note = variant of adenylate kinase from Thermotoga neapolitana
MHHHHHHGGSGMGAYLVLLGPPGAGKGTQGRIISAKTGIPHISTGDILRQIVAKQNDEVASSIKEWMLKGELVPDEIGNPVVKRRLKEKDCEKGFILDGFPRTARQAEYLDSFLESQGRQLTAAVLLEVPEDEVVARLLSRRVCPKCGRSYNMIFLPPKEDELCDDCGVSLVQRLDDKEETVRMRLKVYREKTQPVIDYYSKKGILARVDGSQEIMPIVAEVLGILGWSDK

SEQ ID NO: 2867 - DNA, 693 bp, synthetic construct
  misc_feature 1..693: note = variant of adenylate kinase from Thermotoga neapolitana
  source 1..693: mol_type = other DNA
atgcaccatcatcaccatcacgggggctccggcatgggggcatatctggtgttattaggtccgccgggcgcgggaaaaggtacccaaggccgtattatttcggcaaagactggcatcccgcatattagcacgggcgatatcctgcgtcagatcgtcgctaagcaaaacgatgaagttgcctcgagcattaaaacctggatgctgaaaggtgaactcgttccagatgaaattggtaatcctgtagtaaaacgccgcctgaaggagaaagactgcgaaaaaggctttattttggatggtttcccgcgtaccgtccgtcaagcggaatatctggatagttttcttgaagcgcagggccgccagttgacagccgccgtgctgatcgaggtccccgaagatgaagttgttgcgcgtctgctgtctcgccgtgtttgtccgaaatgcgggcgtagttacaacatgatttttctgccaccaaaagaagacgagctgtgtgacgattgcggtgtcagtttagtacagcgtctggatgataaggaagaaacggtccgtatgcgcctgaaagtctaccgtgagaagacccagccggtcattgactattatagtaagaaaggtattctcgcacgcgtagatgggagccaagaaatcatgcctatcgtggcagaagtcctggggattctgggttggagcgataag

SEQ ID NO: 2868 - protein, 231 aa, synthetic construct
  REGION 1..231: note = variant of adenylate kinase from Thermotoga neapolitana
MHHHHHHGGSGMGAYLVLLGPPGAGKGTQGRIISAKTGIPHISTGDILRQIVAKQNDEVASSIKTWMLKGELVPDEIGNPVVKRRLKEKDCEKGFILDGFPRTVRQAEYLDSFLEAQGRQLTAAVLIEVPEDEVVARLLSRRVCPKCGRSYNMIFLPPKEDELCDDCGVSLVQRLDDKEETVRMRLKVYREKTQPVIDYYSKKGILARVDGSQEIMPIVAEVLGILGWSDK

SEQ ID NO: 2869 - DNA, 693 bp, synthetic construct
  misc_feature 1..693: note = variant of adenylate kinase from Thermotoga neapolitana
  source 1..693: mol_type = other DNA
atgcaccatcatcaccatcacgggggctccggcatgggggcatatctggtgttattaggtccgccgggcgcgggaaaaggtacccaaggccgtattatttcggcaaagactggcatcccgcatattagcacgggcgatatcctgcgtcagatcgtcgctaagcaaaacgatgaagttgcctcgagcattaaagagtggatgctgaaaggtgaactcgttccagatgaaattggtaatcctgtagtaaaacgccgcctgaaggagaaagactgcgaaaaaggctttattttggatggtttcccgcgtaccgtgcgccaagcggaatatctggatagttttcttgaaagccagggccgccagttgacagccgccgtgctgctggaggtccccgaagatgaagttgttgcacgtctgctgtctcgccgtgtttgtccgaaatgcgggcgtagttacaacatgatttttctgccaccaaaagaagacgagctgtgtgacgattgcggtgtcagcttagtacagcgtttagatgataaggaagaaacggtccgtatgcgcctgaaagtctaccgtgagaagacccagggggtcattgactattatagtaagaaaggtattctcgcacgcgtagatgggagccaagaaatcatgcctatcgtggcagaagtcctggggattctgggttggagcgataag

SEQ ID NO: 2870 - protein, 231 aa, synthetic construct
  REGION 1..231: note = variant of adenylate kinase from Thermotoga neapolitana
MHHHHHHGGSGMGAYLVLLGPPGAGKGTQGRIISAKTGIPHISTGDILRQIVAKQNDEVASSIKEWMLKGELVPDEIGNPVVKRRLKEKDCEKGFILDGFPRTVRQAEYLDSFLESQGRQLTAAVLLEVPEDEVVARLLSRRVCPKCGRSYNMIFLPPKEDELCDDCGVSLVQRLDDKEETVRMRLKVYREKTQGVIDYYSKKGILARVDGSQEIMPIVAEVLGILGWSDK

SEQ ID NO: 2871 - DNA, 693 bp, synthetic construct
  misc_feature 1..693: note = variant of adenylate kinase from Thermotoga neapolitana
  source 1..693: mol_type = other DNA
atgcaccatcatcaccatcacgggggctccggcatgggggcatatctggtgttattaggtccgccgggcgcgggaaaaggtacccaaggccgtattatttcggcaaagactggcatcccgcatattagcacgggcgatatcctgcgtcagatcgtcgctaagcaaaacgatgaagttgcctcgagcattaaagagtggatgctgaaaggtgaactcgttccagatgaaattggtaatcctgtagtaaaacgccgcctgaaggagaaagactgcgaaaaaggctttattttggatggtttcccgcgtaccgtcaagcaagcggaatatctggatagttttcttgaaagccagggccgccagttgacagccgccgtgctgatcgaggtccccgaagatgaagttgttgtgcgtctgctgtctcgccgtgtttgtccgaaatgcgggcgtagttacaacatgatttttctgccaccaaaagaagacgagctgtgtgacgattgcggtgtcagtttagtacagcgtctggatgataaggaagaaacggtccgtatgcgcctgaaagtctaccgtgagaagacccagccggtcattgactattatagtaagaaaggtattctcgcacgcgtagatgggagccaagaaatcatgcctatcgtggcagaagtcctggggattctgggttggagcgataag

SEQ ID NO: 2872 - protein, 231 aa, synthetic construct
  REGION 1..231: note = variant of adenylate kinase from Thermotoga neapolitana
MHHHHHHGGSGMGAYLVLLGPPGAGKGTQGRIISAKTGIPHISTGDILRQIVAKQNDEVASSIKEWMLKGELVPDEIGNPVVKRRLKEKDCEKGFILDGFPRTVKQAEYLDSFLESQGRQLTAAVLIEVPEDEVVVRLLSRRVCPKCGRSYNMIFLPPKEDELCDDCGVSLVQRLDDKEETVRMRLKVYREKTQPVIDYYSKKGILARVDGSQEIMPIVAEVLGILGWSDK

SEQ ID NO: 2873 - DNA, 693 bp, synthetic construct
  misc_feature 1..693: note = variant of adenylate kinase from Thermotoga neapolitana
  source 1..693: mol_type = other DNA
atgcaccatcatcaccatcacgggggctccggcatgggggcatatctggtgttattaggtccgccgggcgcgggaaaaggtacccaaggccgtattatttcggcaaagactggcatcccgcatattagcacgggcgatatcctgcgtcagatcgtcgctaagcaaaacgatgaagttgcctcgagcattaaagaatggatgctgaaaggtgaactcgttccagatgaaattggtaatcctgtagtaaaacgccgcctgaaggagaaagactgcgaaaaaggctttattttggatggtttcccgcgtaccgtccgtcaagcggaatatctggatagttttcttgaagcgcagggccgccagttgacagccgccgtgctgctggaggtccccgaagatgaagttgtttaccgtctgctgtctcgccgtgtttgtccgaaatgcgggcgtagttacaacatgatttttctgccaccaaaagaagacgagctgtgtgacgattgcggtgtcagtttagtacagcgtttcgatgataaggaagaaacggtccgtatgcgcctgaaagtctaccgtgagaagacccagccggtcattgactattatagtaagaaaggtattctcgcacgcgtagatgggagccaagaaatcatgcctatcgtggcagaagtcctggggattctgggttggagcgataag

SEQ ID NO: 2874 - protein, 231 aa, synthetic construct
  REGION 1..231: note = variant of adenylate kinase from Thermotoga neapolitana
MHHHHHHGGSGMGAYLVLLGPPGAGKGTQGRIISAKTGIPHISTGDILRQIVAKQNDEVASSIKEWMLKGELVPDEIGNPVVKRRLKEKDCEKGFILDGFPRTVRQAEYLDSFLEAQGRQLTAAVLLEVPEDEVVYRLLSRRVCPKCGRSYNMIFLPPKEDELCDDCGVSLVQRFDDKEETVRMRLKVYREKTQPVIDYYSKKGILARVDGSQEIMPIVAEVLGILGWSDK

SEQ ID NO: 2875 - DNA, 693 bp, synthetic construct
  misc_feature 1..693: note = variant of adenylate kinase from Thermotoga neapolitana
  source 1..693: mol_type = other DNA
atgcaccatcatcaccatcacgggggctccggcatgggggcatatctggtgttattaggtccgccgggcgcgggaaaaggtacccaaggccgtattatttcggcaaagactggcatcccgcatattagcacgggcgatatcctgcgtcagatcgtcgctaagcaaaacgatgaagttgcctcgagcattaaaacctggatgctgaaaggtgaactcgttccagatgaaattggtaatcctgtagtaaaacgccgcctgaaggagaaagactgcgaaaaaggctttattttggatggtttcccgcgtaccgtccgtcaagcggaatatctggatagttttcttgaaagccagggccgccagttgacagccgccgtgctgctggaggtccccgaagatgaagttgttgtgcgtctgctgtctcgccgtgtttgtccgaaatgcgggcgtagttacaacatgatttttctgccaccaaaagaagacgagctgtgtgacgattgcggtgtccgtttagtacagcgtctggatgataaggaagaaacggtccgtatgcgcctgaaagtctaccgtgagaagacccagccggtcattgactattatagtaagaaaggtattctcgcacgcgtagatgggagccaagaaatcatgcctatcgtggcagaagtcctggggattctgggttggagcgataag

SEQ ID NO: 2876 - protein, 231 aa, synthetic construct
  REGION 1..231: note = variant of adenylate kinase from Thermotoga neapolitana
MHHHHHHGGSGMGAYLVLLGPPGAGKGTQGRIISAKTGIPHISTGDILRQIVAKQNDEVASSIKTWMLKGELVPDEIGNPVVKRRLKEKDCEKGFILDGFPRTVRQAEYLDSFLESQGRQLTAAVLLEVPEDEVVVRLLSRRVCPKCGRSYNMIFLPPKEDELCDDCGVRLVQRLDDKEETVRMRLKVYREKTQPVIDYYSKKGILARVDGSQEIMPIVAEVLGILGWSDK

SEQ ID NO: 2877 - DNA, 693 bp, synthetic construct
  misc_feature 1..693: note = variant of adenylate kinase from Thermotoga neapolitana
  source 1..693: mol_type = other DNA
atgcaccatcatcaccatcacgggggctccggcatgggggcatatctggtgttattaggtccgccgggcgcgggaaaaggtacccaaggccgtattatttcggcaaagactggcatcccgcatattagcacgggcgatatcctgcgtcagatcgtcgctaagcaaaacgatgaagttgcctcgagcattaaaacctggatgctgaaaggtgaactcgttccagatgaaattggtaatcctgtagtaaaacgccgcctgaaggagaaagactgcgaaaaaggctttattttggatggtttcccgcgtaccgtcaagcaagcggaatatctggatagttttcttgaagcgcagggccgccagttgacagccgccgtgctgatcgaggtccccgaagatgaagttgttgtgcgtctgctgtctcgccgtgtttgtccgaaatgcgggcgtagttacaacatgatttttctgccaccaaaagaagacgagctgtgtgacgattgcggtgtccgtttagtacagcgtctggatgataaggaagaaacggtccgtatgcgcctgaaagtctaccgtgagaagacccagccggtcattgactattatagtaagaaaggtattctcgcacgcgtagatgggagccaagaaatcatgcctatcgtggcagaagtcctggggattctgggttggagcgataag

SEQ ID NO: 2878 - protein, 231 aa, synthetic construct
  REGION 1..231: note = variant of adenylate kinase from Thermotoga neapolitana
MHHHHHHGGSGMGAYLVLLGPPGAGKGTQGRIISAKTGIPHISTGDILRQIVAKQNDEVASSIKTWMLKGELVPDEIGNPVVKRRLKEKDCEKGFILDGFPRTVKQAEYLDSFLEAQGRQLTAAVLIEVPEDEVVVRLLSRRVCPKCGRSYNMIFLPPKEDELCDDCGVRLVQRLDDKEETVRMRLKVYREKTQPVIDYYSKKGILARVDGSQEIMPIVAEVLGILGWSDK

SEQ ID NO: 2879 - DNA, 693 bp, synthetic construct
  misc_feature 1..693: note = variant of adenylate kinase from Thermotoga neapolitana
  source 1..693: mol_type = other DNA
atgcaccatcatcaccatcacgggggctccggcatgggggcatatctggtgttattaggtccgccgggcgcgggaaaaggtacccaaggccgtattatttcggcaaagactggcatcccgcatattagcacgggcgatatcctgcgtcagatcgtcgctaagcaaaacgatgaagttgcctcgagcattaaaacctggatgctgaaaggtgaactcgttccagatgaaattggtaatcctgtagtaaaacgccgcctgaaggagaaagactgcgaaaaaggctttattttggatggtttcccgcgtaccgtccgtcaagcggaatatctggatagttttcttgaaagccagggccgccagttgacagccgccgtgctgctggaggtccccgaagatgaagttgtttaccgtctgctgtctcgccgtgtttgtccgaaatgcgggcgtagttacaacatgatttttctgccaccaaaagaagacgagctgtgtgacgattgcggtgtcagtttagtacagcgtctggatgataaggaagaaacggtccgtatgcgcctgaaagtctaccgtgagaagacccagccggtcattgactattatagtaagaaaggtattctcgcacgcgtagatgggagccaagaaatcatgcctatcgtggcagaagtcctggggattctgggttggagcgataag

SEQ ID NO: 2880 - protein, 231 aa, synthetic construct
  REGION 1..231: note = variant of adenylate kinase from Thermotoga neapolitana
MHHHHHHGGSGMGAYLVLLGPPGAGKGTQGRIISAKTGIPHISTGDILRQIVAKQNDEVASSIKTWMLKGELVPDEIGNPVVKRRLKEKDCEKGFILDGFPRTVRQAEYLDSFLESQGRQLTAAVLLEVPEDEVVYRLLSRRVCPKCGRSYNMIFLPPKEDELCDDCGVSLVQRLDDKEETVRMRLKVYREKTQPVIDYYSKKGILARVDGSQEIMPIVAEVLGILGWSDK

SEQ ID NO: 2881 - DNA, 693 bp, synthetic construct
  misc_feature 1..693: note = variant of adenylate kinase from Thermotoga neapolitana
  source 1..693: mol_type = other DNA
atgcaccatcatcaccatcacgggggctccggcatgggggcatatctggtgttattaggtccgccgggcgcgggaaaaggtacccaaggccgtattatttcggcaaagactggcatcccgcatattagcacgggcgatatcctgcgtcagatcgtcgctaagcaaaacgatgaagttgcctcgagcattaaagaatggatgctgaaaggtgaactcgttccagatgaaattggtaatcctgtagtaaaacgccgcctgaaggagaaagactgcgaaaaaggctttattttggatggtttcccgcgtaccgtccgtcaagcggaatatctggatagttttcttgaatcgcagggccgccagttgacagccgccgtgctgatcgaggtccccgaagatgaagttgttgcgcgtctgctgtctcgccgtgtttgtccgaaatgcgggcgtagttacaacatgatttttctgccaccaaaagaagacgagctgtgtgacgattgcggtgtccgtttagtacagcgtctggatgataaggaagaaacggtccgtatgcgcctgaaagtctaccgtgagaagacccagccggtcattgactattatagtaagaaaggtattctcgcacgcgtagatgggagccaagaaatcatgcctatcgtggcagaagtcctggggattctgggttggagcgataag

SEQ ID NO: 2882 - protein, 231 aa, synthetic construct
  REGION 1..231: note = variant of adenylate kinase from Thermotoga neapolitana
MHHHHHHGGSGMGAYLVLLGPPGAGKGTQGRIISAKTGIPHISTGDILRQIVAKQNDEVASSIKEWMLKGELVPDEIGNPVVKRRLKEKDCEKGFILDGFPRTVRQAEYLDSFLESQGRQLTAAVLIEVPEDEVVARLLSRRVCPKCGRSYNMIFLPPKEDELCDDCGVRLVQRLDDKEETVRMRLKVYREKTQPVIDYYSKKGILARVDGSQEIMPIVAEVLGILGWSDK

SEQ ID NO: 2883 - DNA, 693 bp, synthetic construct
  misc_feature 1..693: note = variant of adenylate kinase from Thermotoga neapolitana
  source 1..693: mol_type = other DNA
atgcaccatcatcaccatcacgggggctccggcatgggggcatatctggtgttattaggtccgccgggcgcgggaaaaggtacccaaggccgtattatttcggcaaagactggcatcccgcatattagcacgggcgatatcctgcgtcagatcgtcgctaagcaaaacgatgaagttgcctcgagcattaaaacctggatgctgaaaggtgaactcgttccagatgaaattggtaatcctgtagtaaaacgccgcctgaaggagaaagactgcgaaaaaggctttattttggatggtttcccgcgtaccgtcaagcaagcggaatatctggatagttttcttgaaagccagggccgccagttgacagccgccgtgctgctggaggtccccgaagatgaagttgttgtgcgtctgctgtctcgccgtgtttgtccgaaatgcgggcgtagttacaacatgatttttctgccaccaaaagaagacgagctgtgtgacgattgcggtgtcagtttagtacagcgtttcgatgataaggaagaaacggtccgtatgcgcctgaaagtctaccgtgagaagacccagccggtcattgactattatagtaagaaaggtattctcgcacgcgtagatgggagccaagaaatcatgcctatcgtggcagaagtcctggggattctgggttggagcgataag

SEQ ID NO: 2884 - protein, 231 aa, synthetic construct
  REGION 1..231: note = variant of adenylate kinase from Thermotoga neapolitana
MHHHHHHGGSGMGAYLVLLGPPGAGKGTQGRIISAKTGIPHISTGDILRQIVAKQNDEVASSIKTWMLKGELVPDEIGNPVVKRRLKEKDCEKGFILDGFPRTVKQAEYLDSFLESQGRQLTAAVLLEVPEDEVVVRLLSRRVCPKCGRSYNMIFLPPKEDELCDDCGVSLVQRFDDKEETVRMRLKVYREKTQPVIDYYSKKGILARVDGSQEIMPIVAEVLGILGWSDK

SEQ ID NO: 2885 - DNA, 693 bp, synthetic construct
  misc_feature 1..693: note = variant of adenylate kinase from Thermotoga neapolitana
  source 1..693: mol_type = other DNA
atgcaccatcatcaccatcacgggggctccggcatgggggcatatctggtgttattaggtccgccgggcgcgggaaaaggtacccaaggccgtattatttcggcaaagactggcatcccgcatattagcacgggcgatatcctgcgtcagatcgtcgctaagcaaaacgatgaagttgcctcgagcattaaaacctggatgctgaaaggtgaactcgttccagatgaaattggtaatcctgtagtaaaacgccgcctgaaggagaaagactgcgaaaaaggctttattttggatggtttcccgcgtaccgtcaagcaagcggaatatctggatagttttcttgaaagccagggccgccagttgacagccgccgtgctgatcgaggtccccgaagatgaagttgttgtgcgtctgctgtctcgccgtgtttgtccgaaatgcgggcgtagttacaacatgatttttctgccaccaaaagaagacgagctgtgtgacgattgcggtgtccgtttagtacagcgtctggatgataaggaagaaacggtccgtatgcgcctgaaagtctaccgtgagaagacccagccggtcattgactattatagtaagaaaggtattctcgcacgcgtagatgggagccaagaaatcatgcctatcgtggcagaagtcctggggattctgggttggagcgataag

SEQ ID NO: 2886 - protein, 231 aa, synthetic construct
  REGION 1..231: note = variant of adenylate kinase from Thermotoga neapolitana
MHHHHHHGGSGMGAYLVLLGPPGAGKGTQGRIISAKTGIPHISTGDILRQIVAKQNDEVASSIKTWMLKGELVPDEIGNPVVKRRLKEKDCEKGFILDGFPRTVKQAEYLDSFLESQGRQLTAAVLIEVPEDEVVVRLLSRRVCPKCGRSYNMIFLPPKEDELCDDCGVRLVQRLDDKEETVRMRLKVYREKTQPVIDYYSKKGILARVDGSQEIMPIVAEVLGILGWSDK

SEQ ID NO: 2887 - DNA, 693 bp, synthetic construct
  misc_feature 1..693: note = variant of adenylate kinase from Thermotoga neapolitana
  source 1..693: mol_type = other DNA
atgcaccatcatcaccatcacgggggctccggcatgggggcatatctggtgttattaggtccgccgggcgcgggaaaaggtacccaaggccgtattatttcggcaaagactggcatcccgcatattagcacgggcgatatcctgcgtcagatcgtcgctaagcaaaacgatgaagttgcctcgagcattaaagaatggatgctgaaaggtgaactcgttccagatgaaattggtaatcctgtagtaaaacgccgcctgaaggagaaagactgcgaaaaaggctttattttggatggtttcccgcgtaccgccaagcaagcggaatatctggatagttttcttgaatcgcagggccgccagttgacagccgccgtgctgatcgaggtccccgaagatgaagttgttgcgcgtctgctgtctcgccgtgtttgtccgaaatgcgggcgtagttacaacatgatttttctgccaccaaaagaagacgagctgtgtgacgattgcggtgtcagtttagtacagcgtctggatgataaggaagaaacggtccgtatgcgcctgaaagtctaccgtgagaagacccagccggtcattgactattatagtaagaaaggtattctcgcacgcgtagatgggagccaagaaatcatgcctatcgtggcagaagtcctggggattctgggttggagcgataag

SEQ ID NO: 2888 - protein, 231 aa, synthetic construct
  REGION 1..231: note = variant of adenylate kinase from Thermotoga neapolitana
MHHHHHHGGSGMGAYLVLLGPPGAGKGTQGRIISAKTGIPHISTGDILRQIVAKQNDEVASSIKEWMLKGELVPDEIGNPVVKRRLKEKDCEKGFILDGFPRTAKQAEYLDSFLESQGRQLTAAVLIEVPEDEVVARLLSRRVCPKCGRSYNMIFLPPKEDELCDDCGVSLVQRLDDKEETVRMRLKVYREKTQPVIDYYSKKGILARVDGSQEIMPIVAEVLGILGWSDK

SEQ ID NO: 2889 - DNA, 693 bp, synthetic construct
  misc_feature 1..693: note = variant of adenylate kinase from Thermotoga neapolitana
  source 1..693: mol_type = other DNA
atgcaccatcatcaccatcacgggggctccggcatgggggcatatctggtgttattaggtccgccgggcgcgggaaaaggtacccaaggccgtattatttcggcaaagactggcatcccgcatattagcacgggcgatatcctgcgtcagatcgtcgctaagcaaaacgatgaagttgcctcgagcattaaagagtggatgctgaaaggtgaactcgttccagatgaaattggtaatcctgtagtaaaacgccgcctgaaggagaaagactgcgaaaaaggctttattttggatggtttcccgcgtaccgtccgtcaagcggaatatctggatagttttcttgaaagccagggccgccagttgacagccgccgtgctgatcgaggtccccgaagatgaagttgttgtgcgtctgctgtctcgccgtgtttgtccgaaatgcgggcgtagttacaacatgatttttctgccaccaaaagaagacgagctgtgtgacgattgcggtgtcagtttagtacagcgtctggatgataaggaagaaacggtccgtatgcgcctgaaagtctaccgtgagaagacccagccggtcattgactattatagtaagaaaggtattctcgcacgcgtagatgggagccaagaaatcatgcctatcgtggcagaagtcctggggattctgggttggagcgataag

SEQ ID NO: 2890 - protein, 231 aa, synthetic construct
  REGION 1..231: note = variant of adenylate kinase from Thermotoga neapolitana
MHHHHHHGGSGMGAYLVLLGPPGAGKGTQGRIISAKTGIPHISTGDILRQIVAKQNDEVASSIKEWMLKGELVPDEIGNPVVKRRLKEKDCEKGFILDGFPRTVRQAEYLDSFLESQGRQLTAAVLIEVPEDEVVVRLLSRRVCPKCGRSYNMIFLPPKEDELCDDCGVSLVQRLDDKEETVRMRLKVYREKTQPVIDYYSKKGILARVDGSQEIMPIVAEVLGILGWSDK

SEQ ID NO: 2891 - DNA, 693 bp, synthetic construct
  misc_feature 1..693: note = variant of adenylate kinase from Thermotoga neapolitana
  source 1..693: mol_type = other DNA
atgcaccatcatcaccatcacgggggctccggcatgggggcatatctggtgttattaggtccgccgggcgcgggaaaaggtacccaaggccgtattatttcggcaaagactggcatcccgcatattagcacgggcgatatcctgcgtcagatcgtcgctaagcaaaacgatgaagttgcctcgagcattaaagagtggatgctgaaaggtgaactcgttccagatgaaattggtaatcctgtagtaaaacgccgcctgaaggagaaagactgcgaaaaaggctttattttggatggtttcccgcgtaccgtcaagcaagcggaatatctggatagttttcttgaaagccagggccgccagttgacagccgccgtgctgctggaggtccccgaagatgaagttgttgtgcgtctgctgtctcgccgtgtttgtccgaaatgcgggcgtagttacaacatgatttttctgccaccaaaagaagacgagctgtgtgacgattgcggtgtcagtttagtacagcgtctggatgataaggaagaaacggtccgtatgcgcctgaaagtctaccgtgagaagacccagccggtcattgactattatagtaagaaaggtattctcgcacgcgtagatgggagccaagaaatcatgcctatcgtggcagaagtcctggggattctgggttggagcgataag

SEQ ID NO: 2892 - protein, 231 aa, synthetic construct
  REGION 1..231: note = variant of adenylate kinase from Thermotoga neapolitana
MHHHHHHGGSGMGAYLVLLGPPGAGKGTQGRIISAKTGIPHISTGDILRQIVAKQNDEVASSIKEWMLKGELVPDEIGNPVVKRRLKEKDCEKGFILDGFPRTVKQAEYLDSFLESQGRQLTAAVLLEVPEDEVVVRLLSRRVCPKCGRSYNMIFLPPKEDELCDDCGVSLVQRLDDKEETVRMRLKVYREKTQPVIDYYSKKGILARVDGSQEIMPIVAEVLGILGWSDK

SEQ ID NO: 2893 - DNA, 693 bp, synthetic construct
  misc_feature 1..693: note = variant of adenylate kinase from Thermotoga neapolitana
  source 1..693: mol_type = other DNA
atgcaccatcatcaccatcacgggggctccggcatgggggcatatctggtgttattaggtccgccgggcgcgggaaaaggtacccaaggccgtattatttcggcaaagactggcatcccgcatattagcacgggcgatatcctgcgtcagatcgtcgctaagcaaaacgatgaagttgcctcgagcattaaaacctggatgctgaaaggtgaactcgttccagatgaaattggtaatcctgtagtaaaacgccgcctgaaggagaaagactgcgaaaaaggctttattttggatggtttcccgcgtaccgtcaagcaagcggaatatctggatagttttcttgaaagccagggccgccagttgacagccgccgtgctgatcgaggtccccgaagatgaagttgttgcgcgtctgctgtctcgccgtgtttgtccgaaatgcgggcgtagttacaacatgatttttctgccaccaaaagaagacgagctgtgtgacgattgcggtgtccgtttagtacagcgtctggatgataaggaagaaacggtccgtatgcgcctgaaagtctaccgtgagaagacccagccggtcattgactattatagtaagaaaggtattctcgcacgcgtagatgggagccaagaaatcatgcctatcgtggcagaagtcctggggattctgggttggagcgataag

SEQ ID NO: 2894 - protein, 231 aa, synthetic construct
  REGION 1..231: note = variant of adenylate kinase from Thermotoga neapolitana
MHHHHHHGGSGMGAYLVLLGPPGAGKGTQGRIISAKTGIPHISTGDILRQIVAKQNDEVASSIKTWMLKGELVPDEIGNPVVKRRLKEKDCEKGFILDGFPRTVKQAEYLDSFLESQGRQLTAAVLIEVPEDEVVARLLSRRVCPKCGRSYNMIFLPPKEDELCDDCGVRLVQRLDDKEETVRMRLKVYREKTQPVIDYYSKKGILARVDGSQEIMPIVAEVLGILGWSDK

SEQ ID NO: 2895 - DNA, 693 bp, synthetic construct
  misc_feature 1..693: note = variant of adenylate kinase from Thermotoga neapolitana
  source 1..693: mol_type = other DNA
atgcaccatcatcaccatcacgggggctccggcatgggggcatatctggtgttattaggtccgccgggcgcgggaaaaggtacccaaggccgtattatttcggcaaagactggcatcccgcatattagcacgggcgatatcctgcgtcagatcgtcgctaagcaaaacgatgaagttgcatcgagcattaaagagtggatgctgaaaggtgaactcgttccagatgaaattggtaatcctgtagtaaaacgccgcctgaaggagaaagactgcgaaaaatattttattttggatggtttcccgcgtaccgtgcgccaagcggaatatctggatagctttcttgaaagccagggccgccagttgacagccgccgtgctgattgaggtccccgaagatgaagttgttgcacgtctgctgtctcgccgtgtttgtccgaaatgcgggcgtagttacaacatgatttttctgccaccaaaagaagacgagctgtgtgacgattgcggtgtcagcttagttcgccgtttagatgataaggaagaaacggtccgtatgcgcctgaaggtctaccgtgagaagacccagccggtcattgactattatagtaagaaaggtattctcgcacgcgtagatgggagccaagaaatcatgcctatcgtggcagaagtcctggggattctgggttggagcgataag

SEQ ID NO: 2896 - protein, 231 aa, synthetic construct
  REGION 1..231: note = variant of adenylate kinase from Thermotoga neapolitana
MHHHHHHGGSGMGAYLVLLGPPGAGKGTQGRIISAKTGIPHISTGDILRQIVAKQNDEVASSIKEWMLKGELVPDEIGNPVVKRRLKEKDCEKYFILDGFPRTVRQAEYLDSFLESQGRQLTAAVLIEVPEDEVVARLLSRRVCPKCGRSYNMIFLPPKEDELCDDCGVSLVRRLDDKEETVRMRLKVYREKTQPVIDYYSKKGILARVDGSQEIMPIVAEVLGILGWSDK

SEQ ID NO: 2897 - DNA, 693 bp, synthetic construct
  misc_feature 1..693: note = variant of adenylate kinase from Thermotoga neapolitana
  source 1..693: mol_type = other DNA
atgcaccatcatcaccatcacgggggctccggcatgggggcatatctggtgttattaggtccgccgggcgcgggaaaaggtacccaaggccgtattatttcggcaaagactggcatcccgcatattagcacgggcgatatcctgcgtcagatcgtcgctaagcaaaacgatgaagttgcctcgagcattaaagagtggatgctgaaaggtgaactcgttccagatgaaattggtaatcctgtagtaaaacgccgcctgaaggagaaagactgcgaaaaaggctttattttggatggtttcccgcgtaccgccaagcaagcggaatatctggatagttttcttgaaagccagggccgccagttgacagccgccgtgctgctggaggtccccgaagatgaagttgttgcacgtctgctgtctcgccgtgtttgtccgaaatgcgggcgtagttacaacatgatttttctgccaccaaaagaagacgagctgtgtgacgattgcggtgtcagcttagtacagcgtttagatgataaggaagaaacggtccgtatgcgcctgaaagtctaccgtgagaagacccagccggtcattgactattatagtaagaaaggtattctcgcacgcgtagatgggagccaagaaatcatgcctatcgtggcagaagtcctggggattctgggttggagcgataag

SEQ ID NO: 2898 - protein, 231 aa, synthetic construct
  REGION 1..231: note = variant of adenylate kinase from Thermotoga neapolitana
MHHHHHHGGSGMGAYLVLLGPPGAGKGTQGRIISAKTGIPHISTGDILRQIVAKQNDEVASSIKEWMLKGELVPDEIGNPVVKRRLKEKDCEKGFILDGFPRTAKQAEYLDSFLESQGRQLTAAVLLEVPEDEVVARLLSRRVCPKCGRSYNMIFLPPKEDELCDDCGVSLVQRLDDKEETVRMRLKVYREKTQPVIDYYSKKGILARVDGSQEIMPIVAEVLGILGWSDK

SEQ ID NO: 2899 - DNA, 693 bp, synthetic construct
  misc_feature 1..693: note = variant of adenylate kinase from Thermotoga neapolitana
  source 1..693: mol_type = other DNA
atgcaccatcatcaccatcacgggggctccggcatgggggcatatctggtgttattaggtccgccgggcgcgggaaaaggtacccaaggccgtattatttcggcaaagactggcatcccgcatattagcacgggcgatatcctgcgtcagatcgtcgctaagcaaaacgatgaagttgcatcgagcattaaagagtggatgctgaaaggtgaactcgttccagatgaaattggtaatcctgtagtaaaacgccgcctgaaggagaaagactgcgaaaaatattttattttggatggtttcccgcgtaccgtgcgccaagcggaatatctggatagttttcttgaaagccagggccgccagttgacagccgccgtgctgattgaggtccccgaagatgaagttgttgcacgtctgctgtctcgccgtgtttgtccgaaatgcgggcgtagttacaacatgatttttctgccaccaaaagaagacgagctgtgtgacgattgcggtgtcagcttagttcagcgtttagatgataaggaagaaacggtccgtatgcgcctgggggtctaccgtgagaagacccagccggtcattgactattatagtaagaaaggtattctcgcacgcgtagatgggagccaagaaatcatgcctatcgtggcagaagtcctggggattctgggttggagcgataag

SEQ ID NO: 2900 - protein, 231 aa, synthetic construct
  REGION 1..231: note = variant of adenylate kinase from Thermotoga neapolitana
MHHHHHHGGSGMGAYLVLLGPPGAGKGTQGRIISAKTGIPHISTGDILRQIVAKQNDEVASSIKEWMLKGELVPDEIGNPVVKRRLKEKDCEKYFILDGFPRTVRQAEYLDSFLESQGRQLTAAVLIEVPEDEVVARLLSRRVCPKCGRSYNMIFLPPKEDELCDDCGVSLVQRLDDKEETVRMRLGVYREKTQPVIDYYSKKGILARVDGSQEIMPIVAEVLGILGWSDK

SEQ ID NO: 2901 - DNA, 693 bp, synthetic construct
  misc_feature 1..693: note = variant of adenylate kinase from Thermotoga neapolitana
  source 1..693: mol_type = other DNA
atgcaccatcatcaccatcacgggggctccggcatgggggcatatctggtgttattaggtccgccgggcgcgggaaaaggtacccaaggccgtattatttcggcaaagcttggcatcccgcatattagcacgggcgatatcctgcgtcagatcgtcgctaagcaaaacgatgaagttgcctcgagcattaaagagtggatgctgaaaggtgaactcgttccagatgaaattggtaatcctgtagtaaaacgccgcctgaaggagaaagactgcgaaaaaggctttattttggatggtttcccgcgtaccgtgcgccaagcggaatatctggatagttttcttgaaagccagggccgccagttgacagccgccgtgctgattgaggtccccgaagatgaagttgttgcacgtctgctgtctcgccgtgtttgtccgaaatgcgggcgtagttacaacatgatttttctgccaccaaaagaagacgagctgtgtgacgattgcggtgtcagcttagtacagcgtttagatgataaggaagaaacggtccgtatgcgcctgaaagtctaccgtgagaagacccagccggtcattgactattatagtaagaaaggtattctcgcacgcgtagatgggagccaagaaatcatgcctatcgtggcagaagtcctggggattctgggttggagcgataag

SEQ ID NO: 2902 - protein, 231 aa, synthetic construct
  REGION 1..231: note = variant of adenylate kinase from Thermotoga neapolitana
MHHHHHHGGSGMGAYLVLLGPPGAGKGTQGRIISAKLGIPHISTGDILRQIVAKQNDEVASSIKEWMLKGELVPDEIGNPVVKRRLKEKDCEKGFILDGFPRTVRQAEYLDSFLESQGRQLTAAVLIEVPEDEVVARLLSRRVCPKCGRSYNMIFLPPKEDELCDDCGVSLVQRLDDKEETVRMRLKVYREKTQPVIDYYSKKGILARVDGSQEIMPIVAEVLGILGWSDK

SEQ ID NO: 2903 - DNA, 693 bp, synthetic construct
  misc_feature 1..693: note = variant of adenylate kinase from Thermotoga neapolitana
  source 1..693: mol_type = other DNA
atgcaccatcatcaccatcacgggggctccggcatgggggcatatctggtgttattaggtccgccgggcgcgggaaaaggtacccaaggccgtattatttcggcaaagattggcatcccgcatattagcacgggcgatatcctgcgtcagatcgtcgctaagcaaaacgatgaagttgcctcgagcattaaagagtggatgctgaaaggtgaactcgttccagatgaaattggtaatcctgtagtaaaacgccgcctgaaggagaaagactgcgaaaaaggctttattttggatggtttcccgcgtaccgtgcgccaagcggaatatctggatagttttcttgaaagccagggccgccagttgacagccgccgtgctgattgaggtccccgaagatgaagttgttgcacgtctgctgtctcgccgtgtttgtccgaaatgcgggcgtagttacaacatgatttttctgccaccaaaagaagacgagctgtgtgacgattgcggtgtcagcttagtacagcgtttagatgataaggaagaaacggtccgtatgcgcctgaaagtctaccgtgagaagacccagccggtcattgactattatagtaagaaaggtattctcgcacgcgtagatgggagccaagaaatcatgcctatcgtggcagaagtcctggggattctgggttggagcgataag

SEQ ID NO: 2904 - protein, 231 aa, synthetic construct
  REGION 1..231: note = variant of adenylate kinase from Thermotoga neapolitana
MHHHHHHGGSGMGAYLVLLGPPGAGKGTQGRIISAKIGIPHISTGDILRQIVAKQNDEVASSIKEWMLKGELVPDEIGNPVVKRRLKEKDCEKGFILDGFPRTVRQAEYLDSFLESQGRQLTAAVLIEVPEDEVVARLLSRRVCPKCGRSYNMIFLPPKEDELCDDCGVSLVQRLDDKEETVRMRLKVYREKTQPVIDYYSKKGILARVDGSQEIMPIVAEVLGILGWSDK

SEQ ID NO: 2905 - DNA, 693 bp, synthetic construct
  misc_feature 1..693: note = variant of adenylate kinase from Thermotoga neapolitana
  source 1..693: mol_type = other DNA
atgcaccatcatcaccatcacgggggctccggcatgggggcatatctggtgttattaggtccgccgggcgcgggaaaaggtacccaaggccgtattatttcggcaaagactggcatcccgcatattagcacgggcgatatcctgcgtcagatcgtcgctaagcaaaacgatgaagttgcctcgagcattaaagagtggatgctgaaaggtgaactcgttccagatgaaattggtaatcctgtagtaaaacgccgcctgaaggagaaagactgcgaaaaaggctttattttggatggtttcccgcgtaccgtgcgccaagcggaatatctggatagttttcttgaaagcttgggccgccagttgacagccgccgtgctgattgaggtccccgaagatgaagttgttgcacgtctgctgtctcgccgtgtttgtccgaaatgcgggcgtagttacaacatgatttttctgccaccaaaagaagacgagctgtgtgacgattgcggtgtcagcttagtacagcgtttagatgataaggaagaaacggtccgtatgcgcctgaaagtctaccgtgagaagacccagccggtcattgactattatagtaagaaaggtattctcgcacgcgtagatgggagccaagaaatcatgcctatcgtggcagaagtcctggggattctgggttggagcgataag

SEQ ID NO: 2906 - protein, 231 aa, synthetic construct
  REGION 1..231: note = variant of adenylate kinase from Thermotoga neapolitana
MHHHHHHGGSGMGAYLVLLGPPGAGKGTQGRIISAKTGIPHISTGDILRQIVAKQNDEVASSIKEWMLKGELVPDEIGNPVVKRRLKEKDCEKGFILDGFPRTVRQAEYLDSFLESLGRQLTAAVLIEVPEDEVVARLLSRRVCPKCGRSYNMIFLPPKEDELCDDCGVSLVQRLDDKEETVRMRLKVYREKTQPVIDYYSKKGILARVDGSQEIMPIVAEVLGILGWSDK

SEQ ID NO: 2907 - DNA, 693 bp, synthetic construct
  misc_feature 1..693: note = variant of adenylate kinase from Thermotoga neapolitana
  source 1..693: mol_type = other DNA
atgcaccatcatcaccatcacgggggctccggcatgggggcatatctggtgttattaggtccgccgggcgcgggaaaaggtacccaaggccgtattatttcggcaaagactggcatcccgcatattagcacgggcgatatcctgcgtcagatcgtcgctaagcaaaacgatgaatatgcctcgagcattaaagagtggatgctgaaaggtgaactcgttccagatgaaattggtaatcctgtagtaaaacgccgcctgaaggagaaagactgcgaaaaaggctttattttggatggtttcccgcgtaccgtgcgccaagcggaatatctggatagttttcttgaaagccagggccgccagttgacagccgccgtgctgattgaggtccccgaagatgaagttgttgcacgtctgctgtctcgccgtgtttgtccgaaatgcgggcgtagttacaacatgatttttctgccaccaaaagaagacgagctgtgtgacgattgcggtgtcagcttagtacagcgtttagatgataaggaagaaacggtccgtatgcgcctgaaagtctaccgtgagaagacccagccggtcattgactattatagtaagaaaggtattctcgcacgcgtagatgggagccaagaaatcatgcctatcgtggcagaagtcctggggattctgggttggagcgataag

SEQ ID NO: 2908 - protein, 231 aa, synthetic construct
  REGION 1..231: note = variant of adenylate kinase from Thermotoga neapolitana
MHHHHHHGGSGMGAYLVLLGPPGAGKGTQGRIISAKTGIPHISTGDILRQIVAKQNDEYASSIKEWMLKGELVPDEIGNPVVKRRLKEKDCEKGFILDGFPRTVRQAEYLDSFLESQGRQLTAAVLIEVPEDEVVARLLSRRVCPKCGRSYNMIFLPPKEDELCDDCGVSLVQRLDDKEETVRMRLKVYREKTQPVIDYYSKKGILARVDGSQEIMPIVAEVLGILGWSDK

SEQ ID NO: 2909 - DNA, 693 bp, synthetic construct
  misc_feature 1..693: note = variant of adenylate kinase from Thermotoga neapolitana
  source 1..693: mol_type = other DNA
atgcaccatcatcaccatcacgggggctccggcatgggggcatatctggtgttattaggtccgccgggcgcgggaaaaggtacccaaggccgtattatttcggcaaagactggcatcccgcatattagcacgggcgatatcctgcgtcagatcgtcgctaagcaaaacgatgaagttgcctcgagcattaaagagtggatgctgaaaggtgaactcgttccagatgaaattggtaatcctgtagtaaaacgccgcctgaaggagcctgactgcgaaaaaggctttattttggatggtttcccgcgtaccgtgcgccaagcggaatatctggatagttttcttgaaagccagggccgccagttgacagccgccgtgctgattgaggtccccgaagatgaagttgttgcacgtctgctgtctcgccgtgtttgtccgaaatgcgggcgtagttacaacatgatttttctgccaccaaaagaagacgagctgtgtgacgattgcggtgtcagcttagtacagcgtttagatgataaggaagaaacggtccgtatgcgcctgaaagtctaccgtgagaagacccagccggtcattgactattatagtaagaaaggtattctcgcacgcgtagatgggagccaagaaatcatgcctatcgtggcagaagtcctggggattctgggttggagcgataag

SEQ ID NO: 2910 - protein, 231 aa, synthetic construct
  REGION 1..231: note = variant of adenylate kinase from Thermotoga neapolitana
MHHHHHHGGSGMGAYLVLLGPPGAGKGTQGRIISAKTGIPHISTGDILRQIVAKQNDEVASSIKEWMLKGELVPDEIGNPVVKRRLKEPDCEKGFILDGFPRTVRQAEYLDSFLESQGRQLTAAVLIEVPEDEVVARLLSRRVCPKCGRSYNMIFLPPKEDELCDDCGVSLVQRLDDKEETVRMRLKVYREKTQPVIDYYSKKGILARVDGSQEIMPIVAEVLGILGWSDK

SEQ ID NO: 2911 - DNA, 693 bp, synthetic construct
  misc_feature 1..693: note = variant of adenylate kinase from Thermotoga neapolitana
  source 1..693: mol_type = other DNA
atgcaccatcatcaccatcacgggggctccggcatgggggcatatctggtgttattaggtccgccgggcgcgggaaaaggtacccaaggccgtattatttcggcaaagactggcatctcgcatattagcacgggcgatatcctgcgtcagatcgtcgctaagcaaaacgatgaagttgcctcgagcattaaagagtggatgctgaaaggtgaactcgttccagatgaaattggtaatcctgtagtaaaacgccgcctgaaggagaaagactgcgaaaaaggctttattttggatggtttcccgcgtaccgtgcgccaagcggaatatctggatagttttcttgaaagccagggccgccagttgacagccgccgtgctgattgaggtccccgaagatgaagttgttgcacgtctgctgtctcgccgtgtttgtccgaaatgcgggcgtagttacaacatgatttttctgccaccaaaagaagacgagctgtgtgacgattgcggtgtcagcttagtacagcgtttagatgataaggaagaaacggtccgtatgcgcctgaaagtctaccgtgagaagacccagccggtcattgactattatagtaagaaaggtattctcgcacgcgtagatgggagccaagaaatcatgcctatcgtggcagaagtcctggggattctgggttggagcgataag

SEQ ID NO: 2912 - protein, 231 aa, synthetic construct
  REGION 1..231: note = variant of adenylate kinase from Thermotoga neapolitana
MHHHHHHGGSGMGAYLVLLGPPGAGKGTQGRIISAKTGISHISTGDILRQIVAKQNDEVASSIKEWMLKGELVPDEIGNPVVKRRLKEKDCEKGFILDGFPRTVRQAEYLDSFLESQGRQLTAAVLIEVPEDEVVARLLSRRVCPKCGRSYNMIFLPPKEDELCDDCGVSLVQRLDDKEETVRMRLKVYREKTQPVIDYYSKKGILARVDGSQEIMPIVAEVLGILGWSDK

SEQ ID NO: 2913 - DNA, 693 bp, synthetic construct
  misc_feature 1..693: note = variant of adenylate kinase from Thermotoga neapolitana
  source 1..693: mol_type = other DNA
atgcaccatcatcaccatcacgggggctccggcatgggggcatatctggtgttattaggtccgccgggcgcgggaaaaggtacccaaggccgtattatttcggcaaagactggcatcccgcatattagcacgggcgatatcctgcgtgctatcgtcgctaagcaaaacgatgaagttgcctcgagcattaaagagtggatgctgaaaggtgaactcgttccagatgaaattggtaatcctgtagtaaaacgccgcctgaaggagaaagactgcgaaaaaggctttattttggatggtttcccgcgtaccgtgcgccaagcggaatatctggatagttttcttgaaagccagggccgccagttgacagccgccgtgctgattgaggtccccgaagatgaagttgttgcacgtctgctgtctcgccgtgtttgtccgaaatgcgggcgtagttacaacatgatttttctgccaccaaaagaagacgagctgtgtgacgattgcggtgtcagcttagtacagcgtttagatgataaggaagaaacggtccgtatgcgcctgaaagtctaccgtgagaagacccagccggtcattgactattatagtaagaaaggtattctcgcacgcgtagatgggagccaagaaatcatgcctatcgtggcagaagtcctggggattctgggttggagcgataag

SEQ ID NO: 2914 - protein, 231 aa, synthetic construct
  REGION 1..231: note = variant of adenylate kinase from Thermotoga neapolitana
MHHHHHHGGSGMGAYLVLLGPPGAGKGTQGRIISAKTGIPHISTGDILRAIVAKQNDEVASSIKEWMLKGELVPDEIGNPVVKRRLKEKDCEKGFILDGFPRTVRQAEYLDSFLESQGRQLTAAVLIEVPEDEVVARLLSRRVCPKCGRSYNMIFLPPKEDELCDDCGVSLVQRLDDKEETVRMRLKVYREKTQPVIDYYSKKGILARVDGSQEIMPIVAEVLGILGWSDK

SEQ ID NO: 2915 - DNA, 693 bp, synthetic construct
  misc_feature 1..693: note = variant of adenylate kinase from Thermotoga neapolitana
  source 1..693: mol_type = other DNA
atgcaccatcatcaccatcacgggggctccggcatgggggcatatctggtgttattaggtccgccgggcgcgggaaaaggtacccaaggccgtattatttcggcaaagactggcatcccgcatattagcacgggcgatatcctgcgtcagatcgtcgctaagcaaaacgatgaaacggcctcgagcattaaagagtggatgctgaaaggtgaactcgttccagatgaaattggtaatcctgtagtaaaacgccgcctgaaggagaaagactgcgaaaaaggctttattttggatggtttcccgcgtaccgtgcgccaagcggaatatctggatagttttcttgaaagccagggccgccagttgacagccgccgtgctgattgaggtccccgaagatgaagttgttgcacgtctgctgtctcgccgtgtttgtccgaaatgcgggcgtagttacaacatgatttttctgccaccaaaagaagacgagctgtgtgacgattgcggtgtcagcttagtacagcgtttagatgataaggaagaaacggtccgtatgcgcctgaaagtctaccgtgagaagacccagccggtcattgactattatagtaagaaaggtattctcgcacgcgtagatgggagccaagaaatcatgcctatcgtggcagaagtcctggggattctgggttggagcgataag

SEQ ID NO: 2916 - protein, 231 aa, synthetic construct
  REGION 1..231: note = variant of adenylate kinase from Thermotoga neapolitana
MHHHHHHGGSGMGAYLVLLGPPGAGKGTQGRIISAKTGIPHISTGDILRQIVAKQNDETASSIKEWMLKGELVPDEIGNPVVKRRLKEKDCEKGFILDGFPRTVRQAEYLDSFLESQGRQLTAAVLIEVPEDEVVARLLSRRVCPKCGRSYNMIFLPPKEDELCDDCGVSLVQRLDDKEETVRMRLKVYREKTQPVIDYYSKKGILARVDGSQEIMPIVAEVLGILGWSDK

SEQ ID NO: 2917 - DNA, 693 bp, synthetic construct
  misc_feature 1..693: note = variant of adenylate kinase from Thermotoga neapolitana
  source 1..693: mol_type = other DNA
atgcaccatcatcaccatcacgggggctccggcatgggggcatatctggtgttattaggtccgccgggcgcgggaaaaggtacccaaggccgtattatttcggcaaagactggcatcccgcatattagcacgggcgatatcctgcgtcagatcgtcgctaagcaaaacgatgaagttgcctcgagcattaaagagtggatgctgaaaggtgaactcgttccagatgaaattggtaatcctgtagtaaaacgccgcctgaaggagaaagactgcgaaaaaggctttattttggatggtttcccgcgtaccgtgcgccaagcggaatatctggatagttttcttgaaagccagggccgcttgttgacagccgccgtgctgattgaggtccccgaagatgaagttgttgcacgtctgctgtctcgccgtgtttgtccgaaatgcgggcgtagttacaacatgatttttctgccaccaaaagaagacgagctgtgtgacgattgcggtgtcagcttagtacagcgtttagatgataaggaagaaacggtccgtatgcgcctgaaagtctaccgtgagaagacccagccggtcattgactattatagtaagaaaggtattctcgcacgcgtagatgggagccaagaaatcatgcctatcgtggcagaagtcctggggattctgggttggagcgataag

SEQ ID NO: 2918 - protein, 231 aa, synthetic construct
  REGION 1..231: note = variant of adenylate kinase from Thermotoga neapolitana
MHHHHHHGGSGMGAYLVLLGPPGAGKGTQGRIISAKTGIPHISTGDILRQIVAKQNDEVASSIKEWMLKGELVPDEIGNPVVKRRLKEKDCEKGFILDGFPRTVRQAEYLDSFLESQGRLLTAAVLIEVPEDEVVARLLSRRVCPKCGRSYNMIFLPPKEDELCDDCGVSLVQRLDDKEETVRMRLKVYREKTQPVIDYYSKKGILARVDGSQEIMPIVAEVLGILGWSDK

SEQ ID NO: 2919 - DNA, 693 bp, synthetic construct
  misc_feature 1..693: note = variant of adenylate kinase from Thermotoga neapolitana
  source 1..693: mol_type = other DNA
atgcaccatcatcaccatcacgggggctccggcatgggggcatatctggtgttattaggtccgccgggcgcgggaaaaggtacccaaggccgtattatttcggcagttactggcatcccgcatattagcacgggcgatatcctgcgtcagatcgtcgctaagcaaaacgatgaagttgcctcgagcattaaagagtggatgctgaaaggtgaactcgttccagatgaaattggtaatcctgtagtaaaacgccgcctgaaggagaaagactgcgaaaaaggctttattttggatggtttcccgcgtaccgtgcgccaagcggaatatctggatagttttcttgaaagccagggccgccagttgacagccgccgtgctgattgaggtccccgaagatgaagttgttgcacgtctgctgtctcgccgtgtttgtccgaaatgcgggcgtagttacaacatgatttttctgccaccaaaagaagacgagctgtgtgacgattgcggtgtcagcttagtacagcgtttagatgataaggaagaaacggtccgtatgcgcctgaaagtctaccgtgagaagacccagccggtcattgactattatagtaagaaaggtattctcgcacgcgtagatgggagccaagaaatcatgcctatcgtggcagaagtcctggggattctgggttggagcgataag

SEQ ID NO: 2920 - protein, 231 aa, synthetic construct
  REGION 1..231: note = variant of adenylate kinase from Thermotoga neapolitana
MHHHHHHGGSGMGAYLVLLGPPGAGKGTQGRIISAVTGIPHISTGDILRQIVAKQNDEVASSIKEWMLKGELVPDEIGNPVVKRRLKEKDCEKGFILDGFPRTVRQAEYLDSFLESQGRQLTAAVLIEVPEDEVVARLLSRRVCPKCGRSYNMIFLPPKEDELCDDCGVSLVQRLDDKEETVRMRLKVYREKTQPVIDYYSKKGILARVDGSQEIMPIVAEVLGILGWSDK

SEQ ID NO: 2921 - DNA, 693 bp, synthetic construct
  misc_feature 1..693: note = variant of adenylate kinase from Thermotoga neapolitana
  source 1..693: mol_type = other DNA
atgcaccatcatcaccatcacgggggctccggcatgggggcatatctggtgttattaggtccgccgggcgcgggaaaaggtacccaaggccgtattatttcggcaaagactggcatcccgcatattagcacgggcgatatcctgcgtcagatcgtcgctaagcaaaacgatgaagttgcctcgagcattaaagagtggatgctgaaaggtgaactcgttccagatgaaattggtaatcctgtagtaaaacgccgcctgaaggagaaagactgcgaaaaaggctttattttggatggtttcccgcgtaccgtgcgccaagcggaatatctggatagttttcttgaaagccagggccgccagttgacagccgccgtgctgattattgtccccgaagatgaagttgttgcacgtctgctgtctcgccgtgtttgtccgaaatgcgggcgtagttacaacatgatttttctgccaccaaaagaagacgagctgtgtgacgattgcggtgtcagcttagtacagcgtttagatgataaggaagaaacggtccgtatgcgcctgaaagtctaccgtgagaagacccagccggtcattgactattatagtaagaaaggtattctcgcacgcgtagatgggagccaagaaatcatgcctatcgtggcagaagtcctggggattctgggttggagcgataag

SEQ ID NO: 2922 - protein, 231 aa, synthetic construct
  REGION 1..231: note = variant of adenylate kinase from Thermotoga neapolitana
MHHHHHHGGSGMGAYLVLLGPPGAGKGTQGRIISAKTGIPHISTGDILRQIVAKQNDEVASSIKEWMLKGELVPDEIGNPVVKRRLKEKDCEKGFILDGFPRTVRQAEYLDSFLESQGRQLTAAVLIIVPEDEVVARLLSRRVCPKCGRSYNMIFLPPKEDELCDDCGVSLVQRLDDKEETVRMRLKVYREKTQPVIDYYSKKGILARVDGSQEIMPIVAEVLGILGWSDK

SEQ ID NO: 2923 - DNA, 693 bp, synthetic construct
  misc_feature 1..693: note = variant of adenylate kinase from Thermotoga neapolitana
  source 1..693: mol_type = other DNA
atgcaccatcatcaccatcacgggggctccggcatgggggcatatctggtgttattaggtccgccgggcgcgggaaaaggtacccaaggccgtattatttcggcaaagactggcatcccgcatattagcacgggcgatatcctgcgtcagatcgtcgctaagcaaaacgatgaagttgcctcgagcattaaagagtggatgctgaaaggtgaactcgttccagatgaaattggtaatcctgtagtaaaacgccgcctgaaggagaaagactgcgaaaaaggctttattttggatggtttcccgcgtaccgtgcgccaagcggaatatctggatagttttcttgaaagccagggccgccagttgacagccgccgtgctgattgaggtccccgaagatgaagttgttgcacgtctgctgtctcgccgtgtttgtccgaaatgcgggcgtagttacaacatgatttttctgccaccaaaagaagacgagctgtgtgacgattgcttggtcagcttagtacagcgtttagatgataaggaagaaacggtccgtatgcgcctgaaagtctaccgtgagaagacccagccggtcattgactattatagtaagaaaggtattctcgcacgcgtagatgggagccaagaaatcatgcctatcgtggcagaagtcctggggattctgggttggagcgataag

SEQ ID NO: 2924 - protein, 231 aa, synthetic construct
  REGION 1..231: note = variant of adenylate kinase from Thermotoga neapolitana
MHHHHHHGGSGMGAYLVLLGPPGAGKGTQGRIISAKTGIPHISTGDILRQIVAKQNDEVASSIKEWMLKGELVPDEIGNPVVKRRLKEKDCEKGFILDGFPRTVRQAEYLDSFLESQGRQLTAAVLIEVPEDEVVARLLSRRVCPKCGRSYNMIFLPPKEDELCDDCLVSLVQRLDDKEETVRMRLKVYREKTQPVIDYYSKKGILARVDGSQEIMPIVAEVLGILGWSDK

SEQ ID NO: 2925 - DNA, 693 bp, synthetic construct
  misc_feature 1..693: note = variant of adenylate kinase from Thermotoga neapolitana
  source 1..693: mol_type = other DNA
atgcaccatcatcaccatcacgggggctccggcatgggggcatatctggtgttattaggtccgccgggcgcgggaaaaggtacccaaggccgtattatttcggcaaagactggcatcccgcatattagcacgggcgatatcctgcgtcagatcgtcgctaagcaaaacgatgaagttgcctcgagcattaaagagtggatgctgaaaggtgaactcgttccagatgaaattggtaatcctgtagtaaaacgccgcctgaaggagaaagactgcgaaaaaggctttattttggatggtttcccgcgtaccgtgcgccaagcggaatatctggatagttttcttgaaagccagggccgccagttgacagccgccgtgctgattgaggtccccgaagatgaagttgttgcacgtctgctgtctcgccgtgtttgtccgaaatgcgggcgtagttacaacatgatttttctgccaccaaaagaagacgagctgtgtgacgattgcggtgtcagcttagtacagcgtttagatgataaggaagaaacggtccgtatgcgcctgaaagtctaccgtgagaagacccagccggtcattgactattatagtaagcttggtattctcgcacgcgtagatgggagccaagaaatcatgcctatcgtggcagaagtcctggggattctgggttggagcgataag

SEQ ID NO: 2926 - protein, 231 aa, synthetic construct
  REGION 1..231: note = variant of adenylate kinase from Thermotoga neapolitana
MHHHHHHGGSGMGAYLVLLGPPGAGKGTQGRIISAKTGIPHISTGDILRQIVAKQNDEVASSIKEWMLKGELVPDEIGNPVVKRRLKEKDCEKGFILDGFPRTVRQAEYLDSFLESQGRQLTAAVLIEVPEDEVVARLLSRRVCPKCGRSYNMIFLPPKEDELCDDCGVSLVQRLDDKEETVRMRLKVYREKTQPVIDYYSKLGILARVDGSQEIMPIVAEVLGILGWSDK

SEQ ID NO: 2927 - DNA, 693 bp, synthetic construct
  misc_feature 1..693: note = variant of adenylate kinase from Thermotoga neapolitana
  source 1..693: mol_type = other DNA
atgcaccatcatcaccatcacgggggctccggcatgggggcatatctggtgttattaggtccgccgggcgcgggaaaaggtacccaaggccgtattatttcggcaaagactggcatcccgcatattagcacgggcgatatcctgcgtcagatcgtcgctaagcaaaacgatgaagttgcctcgagcattaaagagtggatgctgaaaggtgaactcgttccagatgaaattggtaatcctgtagtaaaacgccgcctgaaggagaaaagttgcgaaaaaggctttattttggatggtttcccgcgtaccgtgcgccaagcggaatatctggatagttttcttgaaagccagggccgccagttgacagccgccgtgctgattgaggtccccgaagatgaagttgttgcacgtctgctgtctcgccgtgtttgtccgaaatgcgggcgtagttacaacatgatttttctgccaccaaaagaagacgagctgtgtgacgattgcggtgtcagcttagtacagcgtttagatgataaggaagaaacggtccgtatgcgcctgaaagtctaccgtgagaagacccagccggtcattgactattatagtaagaaaggtattctcgcacgcgtagatgggagccaagaaatcatgcctatcgtggcagaagtcctggggattctgggttggagcgataag

SEQ ID NO: 2928 - protein, 231 aa, synthetic construct
  REGION 1..231: note = variant of adenylate kinase from Thermotoga neapolitana
MHHHHHHGGSGMGAYLVLLGPPGAGKGTQGRIISAKTGIPHISTGDILRQIVAKQNDEVASSIKEWMLKGELVPDEIGNPVVKRRLKEKSCEKGFILDGFPRTVRQAEYLDSFLESQGRQLTAAVLIEVPEDEVVARLLSRRVCPKCGRSYNMIFLPPKEDELCDDCGVSLVQRLDDKEETVRMRLKVYREKTQPVIDYYSKKGILARVDGSQEIMPIVAEVLGILGWSDK

SEQ ID NO: 2929 - DNA, 693 bp, synthetic construct
  misc_feature 1..693: note = variant of adenylate kinase from Thermotoga neapolitana
  source 1..693: mol_type = other DNA
atgcaccatcatcaccatcacgggggctccggcatgggggcatatctggtgttattaggtccgccgggcgcgggaaaaggtacccaaggccgttttatttcggcaaagactggcatcccgcatattagcacgggcgatatcctgcgtcagatcgtcgctaagcaaaacgatgaagttgcctcgagcattaaagagtggatgctgaaaggtgaactcgttccagatgaaattggtaatcctgtagtaaaacgccgcctgaaggagaaagactgcgaaaaaggctttattttggatggtttcccgcgtaccgtgcgccaagcggaatatctggatagttttcttgaaagccagggccgccagttgacagccgccgtgctgattgaggtccccgaagatgaagttgttgcacgtctgctgtctcgccgtgtttgtccgaaatgcgggcgtagttacaacatgatttttctgccaccaaaagaagacgagctgtgtgacgattgcggtgtcagcttagtacagcgtttagatgataaggaagaaacggtccgtatgcgcctgaaagtctaccgtgagaagacccagccggtcattgactattatagtaagaaaggtattctcgcacgcgtagatgggagccaagaaatcatgcctatcgtggcagaagtcctggggattctgggttggagcgataag

SEQ ID NO: 2930 - protein, 231 aa, synthetic construct
  REGION 1..231: note = variant of adenylate kinase from Thermotoga neapolitana
MHHHHHHGGSGMGAYLVLLGPPGAGKGTQGRFISAKTGIPHISTGDILRQIVAKQNDEVASSIKEWMLKGELVPDEIGNPVVKRRLKEKDCEKGFILDGFPRTVRQAEYLDSFLESQGRQLTAAVLIEVPEDEVVARLLSRRVCPKCGRSYNMIFLPPKEDELCDDCGVSLVQRLDDKEETVRMRLKVYREKTQPVIDYYSKKGILARVDGSQEIMPIVAEVLGILGWSDK

SEQ ID NO: 2931 - DNA, 693 bp, synthetic construct
  misc_feature 1..693: note = variant of adenylate kinase from Thermotoga neapolitana
  source 1..693: mol_type = other DNA
atgcaccatcatcaccatcacgggggctccggcatgggggcatatctggtgttattaggtccgccgggcgcgggaaaaggtacccaaggccgtattatttcggcaaagactggcatcccgcatattagcacgggcgatatcctgcgtcagatcgtcgctaagcaaaacgatgaagttgccgagagcattaaagagtggatgctgaaaggtgaactcgttccagatgaaattggtaatcctgtagtaaaacgccgcctgaaggagaaagactgcgaaaaaggctttattttggatggtttcccgcgtaccgtgcgccaagcggaatatctggatagttttcttgaaagccagggccgccagttgacagccgccgtgctgattgaggtccccgaagatgaagttgttgcacgtctgctgtctcgccgtgtttgtccgaaatgcgggcgtagttacaacatgatttttctgccaccaaaagaagacgagctgtgtgacgattgcggtgtcagcttagtacagcgtttagatgataaggaagaaacggtccgtatgcgcctgaaagtctaccgtgagaagacccagccggtcattgactattatagtaagaaaggtattctcgcacgcgtagatgggagccaagaaatcatgcctatcgtggcagaagtcctggggattctgggttggagcgataag

SEQ ID NO: 2932 - protein, 231 aa, synthetic construct
  REGION 1..231: note = variant of adenylate kinase from Thermotoga neapolitana
MHHHHHHGGSGMGAYLVLLGPPGAGKGTQGRIISAKTGIPHISTGDILRQIVAKQNDEVAESIKEWMLKGELVPDEIGNPVVKRRLKEKDCEKGFILDGFPRTVRQAEYLDSFLESQGRQLTAAVLIEVPEDEVVARLLSRRVCPKCGRSYNMIFLPPKEDELCDDCGVSLVQRLDDKEETVRMRLKVYREKTQPVIDYYSKKGILARVDGSQEIMPIVAEVLGILGWSDK

SEQ ID NO: 2933 - DNA, 693 bp, synthetic construct
  misc_feature 1..693: note = variant of adenylate kinase from Thermotoga neapolitana
  source 1..693: mol_type = other DNA
atgcaccatcatcaccatcacgggggctccggcatgggggcatatctggtgttattaggtccgccgggcgcgggaaaaggtacccaaggccgtattatttcggcatcgactggcatcccgcatattagcacgggcgatatcctgcgtcagatcgtcgctaagcaaaacgatgaagttgcctcgagcattaaagagtggatgctgaaaggtgaactcgttccagatgaaattggtaatcctgtagtaaaacgccgcctgaaggagaaagactgcgaaaaaggctttattttggatggtttcccgcgtaccgtgcgccaagcggaatatctggatagttttcttgaaagccagggccgccagttgacagccgccgtgctgattgaggtccccgaagatgaagttgttgcacgtctgctgtctcgccgtgtttgtccgaaatgcgggcgtagttacaacatgatttttctgccaccaaaagaagacgagctgtgtgacgattgcggtgtcagcttagtacagcgtttagatgataaggaagaaacggtccgtatgcgcctgaaagtctaccgtgagaagacccagccggtcattgactattatagtaagaaaggtattctcgcacgcgtagatgggagccaagaaatcatgcctatcgtggcagaagtcctggggattctgggttggagcgataag

SEQ ID NO: 2934 - protein, 231 aa, synthetic construct
  REGION 1..231: note = variant of adenylate kinase from Thermotoga neapolitana
MHHHHHHGGSGMGAYLVLLGPPGAGKGTQGRIISASTGIPHISTGDILRQIVAKQNDEVASSIKEWMLKGELVPDEIGNPVVKRRLKEKDCEKGFILDGFPRTVRQAEYLDSFLESQGRQLTAAVLIEVPEDEVVARLLSRRVCPKCGRSYNMIFLPPKEDELCDDCGVSLVQRLDDKEETVRMRLKVYREKTQPVIDYYSKKGILARVDGSQEIMPIVAEVLGILGWSDK

SEQ ID NO: 2935 - DNA, 693 bp, synthetic construct
  misc_feature 1..693: note = variant of adenylate kinase from Thermotoga neapolitana
  source 1..693: mol_type = other DNA
atgcaccatcatcaccatcacgggggctccggcatgggggcatatctggtgttattaggtccgccgggcgcgggaaaaggtacccaaggccgtattatttcggcaaagactggcatcccgcatattagcacgggcgatatcctgcgtcagatcgtcgctaagcaaaacgatgaagttgccaatagcattaaagagtggatgctgaaaggtgaactcgttccagatgaaattggtaatcctgtagtaaaacgccgcctgaaggagaaagactgcgaaaaaggctttattttggatggtttcccgcgtaccgtgcgccaagcggaatatctggatagttttcttgaaagccagggccgccagttgacagccgccgtgctgattgaggtccccgaagatgaagttgttgcacgtctgctgtctcgccgtgtttgtccgaaatgcgggcgtagttacaacatgatttttctgccaccaaaagaagacgagctgtgtgacgattgcggtgtcagcttagtacagcgtttagatgataaggaagaaacggtccgtatgcgcctgaaagtctaccgtgagaagacccagccggtcattgactattatagtaagaaaggtattctcgcacgcgtagatgggagccaagaaatcatgcctatcgtggcagaagtcctggggattctgggttggagcgataag

SEQ ID NO: 2936 - protein, 231 aa, synthetic construct
  REGION 1..231: note = variant of adenylate kinase from Thermotoga neapolitana
MHHHHHHGGSGMGAYLVLLGPPGAGKGTQGRIISAKTGIPHISTGDILRQIVAKQNDEVANSIKEWMLKGELVPDEIGNPVVKRRLKEKDCEKGFILDGFPRTVRQAEYLDSFLESQGRQLTAAVLIEVPEDEVVARLLSRRVCPKCGRSYNMIFLPPKEDELCDDCGVSLVQRLDDKEETVRMRLKVYREKTQPVIDYYSKKGILARVDGSQEIMPIVAEVLGILGWSDK

SEQ ID NO: 2937 - DNA, 693 bp, synthetic construct
  misc_feature 1..693: note = variant of adenylate kinase from Thermotoga neapolitana
  source 1..693: mol_type = other DNA
atgcaccatcatcaccatcacgggggctccggcatgggggcatatctggtgttattaggtccgccgggcgcgggaaaaggtacccaaggccgtattatttcggcaaagactggcatcccgcatattagcacgggcgatatcctgcgtcagatcgtcgctaagcaaaacgatgaagttgcctcgagcattaaagagtggatgctgaaaggtgaactcgttccagatgaaattggtaatcctgtagtaaaacgccgcctgaaggagaaagactgcgaaaaaggctttattttggatggtttcccgcgtaccgtgcgccaagcggaatatctggatagttttcttgaaagccagggccgccagttgacagccgccgtgctgattgaggtccccgaagatgaagttgttgcacgtctgctgtctcgccgtgtttgtccgaaatgcgggcgtagttacaacatgatttttctgccaccaaaagaagacgagctgtgtgacgattgcggtgtcgggttagtacagcgtttagatgataaggaagaaacggtccgtatgcgcctgaaagtctaccgtgagaagacccagccggtcattgactattatagtaagaaaggtattctcgcacgcgtagatgggagccaagaaatcatgcctatcgtggcagaagtcctggggattctgggttggagcgataag

SEQ ID NO: 2938 - protein, 231 aa, synthetic construct
  REGION 1..231: note = variant of adenylate kinase from Thermotoga neapolitana
MHHHHHHGGSGMGAYLVLLGPPGAGKGTQGRIISAKTGIPHISTGDILRQIVAKQNDEVASSIKEWMLKGELVPDEIGNPVVKRRLKEKDCEKGFILDGFPRTVRQAEYLDSFLESQGRQLTAAVLIEVPEDEVVARLLSRRVCPKCGRSYNMIFLPPKEDELCDDCGVGLVQRLDDKEETVRMRLKVYREKTQPVIDYYSKKGILARVDGSQEIMPIVAEVLGILGWSDK

SEQ ID NO: 2939 - DNA, 693 bp, synthetic construct
  misc_feature 1..693: note = variant of adenylate kinase from Thermotoga neapolitana
  source 1..693: mol_type = other DNA
atgcaccatcatcaccatcacgggggctccggcatgggggcatatctggtgttattaggtccgccgggcgcgggaaaaggtacccaaggccgtattatttcggcaaagactggcatcccgcatattagcacgggcgatatcctgcgtcagatcgtcgctaagcaaaacgatgaagttgcctcgagcattaaagagtggatgctgaaaggtgaactcgttccagatgaaattggtaatcctgtagtaaaacgccgcctgaaggagaaagactgcgaaaaaggctttattttggatggtttcccgcgtaccgtgcgccaagcggaatatctggatagttttcttgaaagccagggccgccagttgacagccgccgtgctgattgaggtccccgaagatgaagttgttgcacgtctgctgtctcgccgtgtttgtccgaaatgcgggcgtagttacaacatgatttttctgccaccaaaagaagacgagctgtgtgacgattgcggtgtcagcttagctcagcgtttagatgataaggaagaaacggtccgtatgcgcctgaaagtctaccgtgagaagacccagccggtcattgactattatagtaagaaaggtattctcgcacgcgtagatgggagccaagaaatcatgcctatcgtggcagaagtcctggggattctgggttggagcgataag

SEQ ID NO: 2940 - protein, 231 aa, synthetic construct
  REGION 1..231: note = variant of adenylate kinase from Thermotoga neapolitana
MHHHHHHGGSGMGAYLVLLGPPGAGKGTQGRIISAKTGIPHISTGDILRQIVAKQNDEVASSIKEWMLKGELVPDEIGNPVVKRRLKEKDCEKGFILDGFPRTVRQAEYLDSFLESQGRQLTAAVLIEVPEDEVVARLLSRRVCPKCGRSYNMIFLPPKEDELCDDCGVSLAQRLDDKEETVRMRLKVYREKTQPVIDYYSKKGILARVDGSQEIMPIVAEVLGILGWSDK

SEQ ID NO: 2941 - DNA, 693 bp, synthetic construct
  misc_feature 1..693: note = variant of adenylate kinase from Thermotoga neapolitana
  source 1..693: mol_type = other DNA
atgcaccatcatcaccatcacgggggctccggcatgggggcatatctggtgttattaggtccgccgggcgcgggaaaaggtacccaaggccgtattatttcggcaaagactggcatcccgcatattagcacgggcgatatcctgcgtcagatcgtcgctaagcaaaacgatgaagttgcctcgagcattaaagagtggatgctgaaaggtgaactcgttccagatgaaattggtaatcctgtagtaaaacgccgcctgaaggagaaagactgcgaaaaaggctttattttggatggtttcccgcgtaccgtgcgccaagcggaatatctggatagttttcttgaaagccagggccgccagttgacagccgccgtgctgattgaggtccccgaagatgaagttgttgcacgtctgctgtctcgccgtgtttgtccgaaatgcgggcgtagttacaacatgatttttctgccaccaaaagaagacgagctgtgtgactcttgcggtgtcagcttagtacagcgtttagatgataaggaagaaacggtccgtatgcgcctgaaagtctaccgtgagaagacccagccggtcattgactattatagtaagaaaggtattctcgcacgcgtagatgggagccaagaaatcatgcctatcgtggcagaagtcctggggattctgggttggagcgataag

SEQ ID NO: 2942 - protein, 231 aa, synthetic construct
  REGION 1..231: note = variant of adenylate kinase from Thermotoga neapolitana
MHHHHHHGGSGMGAYLVLLGPPGAGKGTQGRIISAKTGIPHISTGDILRQIVAKQNDEVASSIKEWMLKGELVPDEIGNPVVKRRLKEKDCEKGFILDGFPRTVRQAEYLDSFLESQGRQLTAAVLIEVPEDEVVARLLSRRVCPKCGRSYNMIFLPPKEDELCDSCGVSLVQRLDDKEETVRMRLKVYREKTQPVIDYYSKKGILARVDGSQEIMPIVAEVLGILGWSDK

SEQ ID NO: 2943 - DNA, 693 bp, synthetic construct
  misc_feature 1..693: note = variant of adenylate kinase from Thermotoga neapolitana
  source 1..693: mol_type = other DNA
atgcaccatcatcaccatcacgggggctccggcatgggggcatatctggtgttattaggtccgccgggcgcgggaaaaggtacccaaggccgtattatttcggcaaagactggcatcccgcatattagcacgggcgatatcctgcgtcagatcgtcgctaagcaaaacgatgaagttgcctcgagcattaaagagtggatgctgaaaggtgaactcgttccagatgaaattggtaatcctgtagtaaaacgccgcctgaaggagaaagactgcgaaaaaggctttattttggatggtttcccgcgtaccgtgcgccaagcggaatatctggatagttttcttgaaagccagggccgccagttgacagccgccgtgctgattcgggtccccgaagatgaagttgttgcacgtctgctgtctcgccgtgtttgtccgaaatgcgggcgtagttacaacatgatttttctgccaccaaaagaagacgagctgtgtgacgattgcggtgtcagcttagtacagcgtttagatgataaggaagaaacggtccgtatgcgcctgaaagtctaccgtgagaagacccagccggtcattgactattatagtaagaaaggtattctcgcacgcgtagatgggagccaagaaatcatgcctatcgtggcagaagtcctggggattctgggttggagcgataag

SEQ ID NO: 2944 - protein, 231 aa, synthetic construct
  REGION 1..231: note = variant of adenylate kinase from Thermotoga neapolitana
MHHHHHHGGSGMGAYLVLLGPPGAGKGTQGRIISAKTGIPHISTGDILRQIVAKQNDEVASSIKEWMLKGELVPDEIGNPVVKRRLKEKDCEKGFILDGFPRTVRQAEYLDSFLESQGRQLTAAVLIRVPEDEVVARLLSRRVCPKCGRSYNMIFLPPKEDELCDDCGVSLVQRLDDKEETVRMRLKVYREKTQPVIDYYSKKGILARVDGSQEIMPIVAEVLGILGWSDK

SEQ ID NO: 2945 - DNA, 693 bp, synthetic construct
  misc_feature 1..693: note = variant of adenylate kinase from Thermotoga neapolitana
  source 1..693: mol_type = other DNA
atgcaccatcatcaccatcacgggggctccggcatgggggcatatctggtgttattaggtccgccgggcgcgggaaaaggtacccaaggccgtattatttcggcaaagactggcatcccgcatattagcacgggcgatatcctgcgtcagatcgtcgctaagcaaaacgattatgttgcctcgagcattaaagagtggatgctgaaaggtgaactcgttccagatgaaattggtaatcctgtagtaaaacgccgcctgaaggagaaagactgcgaaaaaggctttattttggatggtttcccgcgtaccgtgcgccaagcggaatatctggatagttttcttgaaagccagggccgccagttgacagccgccgtgctgattgaggtccccgaagatgaagttgttgcacgtctgctgtctcgccgtgtttgtccgaaatgcgggcgtagttacaacatgatttttctgccaccaaaagaagacgagctgtgtgacgattgcggtgtcagcttagtacagcgtttagatgataaggaagaaacggtccgtatgcgcctgaaagtctaccgtgagaagacccagccggtcattgactattatagtaagaaaggtattctcgcacgcgtagatgggagccaagaaatcatgcctatcgtggcagaagtcctggggattctgggttggagcgataag

SEQ ID NO: 2946 - protein, 231 aa, synthetic construct
  REGION 1..231: note = variant of adenylate kinase from Thermotoga neapolitana
MHHHHHHGGSGMGAYLVLLGPPGAGKGTQGRIISAKTGIPHISTGDILRQIVAKQNDYVASSIKEWMLKGELVPDEIGNPVVKRRLKEKDCEKGFILDGFPRTVRQAEYLDSFLESQGRQLTAAVLIEVPEDEVVARLLSRRVCPKCGRSYNMIFLPPKEDELCDDCGVSLVQRLDDKEETVRMRLKVYREKTQPVIDYYSKKGILARVDGSQEIMPIVAEVLGILGWSDK

SEQ ID NO: 2947 - DNA, 693 bp, synthetic construct
  misc_feature 1..693: note = variant of adenylate kinase from Thermotoga neapolitana
  source 1..693: mol_type = other DNA
atgcaccatcatcaccatcacgggggctccggcatgggggcatatctggtgttattaggtccgccgggcgcgggaaaaggtacccaaggccgtattatttcggcaaagactggcatcccgcatattagcacgggcgatatcctgcgtcagatcgtcgctaagcaaaacgatgaagttgcctcgagcattaaagagtggatgctgaaaggtgaactcgttccagatgaaattggtaatcctgtagtaaaacgccgcctgaaggagaaagactgcgaaaaaggctttattttggatggtttcccgcgtaccgtgcgccaagcggaatatctggatagttttcttgaaagccagggccgccagttgacagccgccgtgctgatttgtgtccccgaagatgaagttgttgcacgtctgctgtctcgccgtgtttgtccgaaatgcgggcgtagttacaacatgatttttctgccaccaaaagaagacgagctgtgtgacgattgcggtgtcagcttagtacagcgtttagatgataaggaagaaacggtccgtatgcgcctgaaagtctaccgtgagaagacccagccggtcattgactattatagtaagaaaggtattctcgcacgcgtagatgggagccaagaaatcatgcctatcgtggcagaagtcctggggattctgggttggagcgataag

SEQ ID NO: 2948 - protein, 231 aa, synthetic construct
  REGION 1..231: note = variant of adenylate kinase from Thermotoga neapolitana
MHHHHHHGGSGMGAYLVLLGPPGAGKGTQGRIISAKTGIPHISTGDILRQIVAKQNDEVASSIKEWMLKGELVPDEIGNPVVKRRLKEKDCEKGFILDGFPRTVRQAEYLDSFLESQGRQLTAAVLICVPEDEVVARLLSRRVCPKCGRSYNMIFLPPKEDELCDDCGVSLVQRLDDKEETVRMRLKVYREKTQPVIDYYSKKGILARVDGSQEIMPIVAEVLGILGWSDK

SEQ ID NO: 2949 - DNA, 693 bp, synthetic construct
  misc_feature 1..693: note = variant of adenylate kinase from Thermotoga neapolitana
  source 1..693: mol_type = other DNA
atgcaccatcatcaccatcacgggggctccggcatgggggcatatctggtgttattaggtccgccgggcgcgggaaaaggtacccaaggccgtattatttcggcaaagactggcatcccgcatattagcacgggcgatatcctgcgtcagatcgtcgctaagcaaaacgatgaagttgcctcgagcattaaagagtggatgctgaaaggtgaactcgttccagatgaaattggtaatcctgtagtaaaacgccgcctgaaggagaaagactgcgaaaaaatgtttattttggatggtttcccgcgtaccgtgcgccaagcggaatatctggatagttttcttgaaagccagggccgccagttgacagccgccgtgctgattgaggtccccgaagatgaagttgttgcacgtctgctgtctcgccgtgtttgtccgaaatgcgggcgtagttacaacatgatttttctgccaccaaaagaagacgagctgtgtgacgattgcggtgtcagcttagtacagcgtttagatgataaggaagaaacggtccgtatgcgcctgaaagtctaccgtgagaagacccagccggtcattgactattatagtaagaaaggtattctcgcacgcgtagatgggagccaagaaatcatgcctatcgtggcagaagtcctggggattctgggttggagcgataag

SEQ ID NO: 2950 - protein, 231 aa, synthetic construct
  REGION 1..231: note = variant of adenylate kinase from Thermotoga neapolitana
MHHHHHHGGSGMGAYLVLLGPPGAGKGTQGRIISAKTGIPHISTGDILRQIVAKQNDEVASSIKEWMLKGELVPDEIGNPVVKRRLKEKDCEKMFILDGFPRTVRQAEYLDSFLESQGRQLTAAVLIEVPEDEVVARLLSRRVCPKCGRSYNMIFLPPKEDELCDDCGVSLVQRLDDKEETVRMRLKVYREKTQPVIDYYSKKGILARVDGSQEIMPIVAEVLGILGWSDK

SEQ ID NO: 2951 - DNA, 693 bp, synthetic construct
  misc_feature 1..693: note = variant of adenylate kinase from Thermotoga neapolitana
  source 1..693: mol_type = other DNA
atgcaccatcatcaccatcacgggggctccggcatgggggcatatctggtgttattaggtccgccgggcgcgggaaaaggtacccaaggccgcattatttcggcaaagactggcatcccgcatattagcacgggcgatatcctgcgtcagatcgtcgctaagcaaaacgatgaagttgcctcgagcattaaagagtggatgctgaaaggtgaactcgttccagatgaaattggtaatcctgtagtaaaacgccgcctgaaggagaaagactgcgaaaaaggctttattttggatggtttcccgcgtaccgtgcgccaagcggaatatctggatagttttcttgaaagccagggccgccagttgacagccgccgtgctgattgaggtccccggggatgaagttgttgcacgtctgctgtctcgccgtgtttgtccgaaatgcgggcgtagttacaacatgatttttctgccaccaaaagaagacgagctgtgtgacgattgcggtgtcagcttagtacagcgtttagatgataaggaagaaacggtccgtatgcgcctgaaagtctaccgtgagaagacccagccggtcattgactattatagtaagaaaggtattctcgcacgcgtagatgggagccaagaaatcatgcctatcgtggcagaagtcctggggattctgggttggagcgataag

SEQ ID NO: 2952 - protein, 231 aa, synthetic construct
  REGION 1..231: note = variant of adenylate kinase from Thermotoga neapolitana
MHHHHHHGGSGMGAYLVLLGPPGAGKGTQGRIISAKTGIPHISTGDILRQIVAKQNDEVASSIKEWMLKGELVPDEIGNPVVKRRLKEKDCEKGFILDGFPRTVRQAEYLDSFLESQGRQLTAAVLIEVPGDEVVARLLSRRVCPKCGRSYNMIFLPPKEDELCDDCGVSLVQRLDDKEETVRMRLKVYREKTQPVIDYYSKKGILARVDGSQEIMPIVAEVLGILGWSDK

SEQ ID NO: 2953 - DNA, 693 bp, synthetic construct
  misc_feature 1..693: note = variant of adenylate kinase from Thermotoga neapolitana
  source 1..693: mol_type = other DNA
atgcaccatcatcaccatcacgggggctccggcatgggggcatatctggtgttattaggtccgccgggcgcgggaaaaggtacccaaggccgtattatttcggcaaagactggcatcccgcatattagcacgggcgatatcctgcgtcagatcgtcgctaagcaaaacgatgaagttgcctcgagcattaaagagtggatgctgaaaggtgaactcgttccagatgaaattggtaatcctgtagtaaaacgccgcctgaaggagaaagactgcgaaaaaggctttattttggatggtttcccgcgtaccgtgcgccaagcggaatatctgcgtagttttcttgaaagccagggccgccagttgacagccgccgtgctgattgaggtccccgaagatgaagttgttgcacgtctgctgtctcgccgtgtttgtccgaaatgcgggcgtagttacaacatgatttttctgccaccaaaagaagacgagctgtgtgacgattgcggtgtcagcttagtacagcgtttagatgataaggaagaaacggtccgtatgcgcctgaaagtctaccgtgagaagacccagccggtcattgactattatagtaagaaaggtattctcgcacgcgtagatgggagccaagaaatcatgcctatcgtggcagaagtcctggggattctgggttggagcgataag

SEQ ID NO: 2954 - protein, 231 aa, synthetic construct
  REGION 1..231: note = variant of adenylate kinase from Thermotoga neapolitana
MHHHHHHGGSGMGAYLVLLGPPGAGKGTQGRIISAKTGIPHISTGDILRQIVAKQNDEVASSIKEWMLKGELVPDEIGNPVVKRRLKEKDCEKGFILDGFPRTVRQAEYLRSFLESQGRQLTAAVLIEVPEDEVVARLLSRRVCPKCGRSYNMIFLPPKEDELCDDCGVSLVQRLDDKEETVRMRLKVYREKTQPVIDYYSKKGILARVDGSQEIMPIVAEVLGILGWSDK

SEQ ID NO: 2955 - DNA, 693 bp, synthetic construct
  misc_feature 1..693: note = variant of adenylate kinase from Thermotoga neapolitana
  source 1..693: mol_type = other DNA
atgcaccatcatcaccatcacgggggctccggcatgggggcatatctggtgttattaggtccgccgggcgcgggaaaaggtacccaaggccgtattatttcggcaaagactggcatcccgcatattagcacgggcgatatcctgcgtaatatcgtcgctaagcaaaacgatgaagttgcctcgagcattaaagagtggatgctgaaaggtgaactcgttccagatgaaattggtaatcctgtagtaaaacgccgcctgaaggagaaagactgcgaaaaaggctttattttggatggtttcccgcgtaccgtgcgccaagcggaatatctggatagttttcttgaaagccagggccgccagttgacagccgccgtgctgattgaggtccccgaagatgaagttgttgcacgtctgctgtctcgccgtgtttgtccgaaatgcgggcgtagttacaacatgatttttctgccaccaaaagaagacgagctgtgtgacgattgcggtgtcagcttagtacagcgtttagatgataaggaagaaacggtccgtatgcgcctgaaagtctaccgtgagaagacccagccggtcattgactattatagtaagaaaggtattctcgcacgcgtagatgggagccaagaaatcatgcctatcgtggcagaagtcctggggattctgggttggagcgataag

SEQ ID NO: 2956 - protein, 231 aa, synthetic construct
  REGION 1..231: note = variant of adenylate kinase from Thermotoga neapolitana
MHHHHHHGGSGMGAYLVLLGPPGAGKGTQGRIISAKTGIPHISTGDILRNIVAKQNDEVASSIKEWMLKGELVPDEIGNPVVKRRLKEKDCEKGFILDGFPRTVRQAEYLDSFLESQGRQLTAAVLIEVPEDEVVARLLSRRVCPKCGRSYNMIFLPPKEDELCDDCGVSLVQRLDDKEETVRMRLKVYREKTQPVIDYYSKKGILARVDGSQEIMPIVAEVLGILGWSDK

SEQ ID NO: 2957 - DNA, 693 bp, synthetic construct
  misc_feature 1..693: note = variant of adenylate kinase from Thermotoga neapolitana
  source 1..693: mol_type = other DNA
atgcaccatcatcaccatcacgggggctccggcatgggggcatatctggtgttattaggtccgccgggcgcgggaaaaggtacccaaggccgtattatttcggcaaagactggcatcccgcatattagcacgggcgatatcctgcgtcagatcgtcgctaagcaaaacgatgaagttgcctcgagcattaaagagtggatgctgaaaggtgaactcgttccagatgaaattggtaatcctgtagtaaaacgccgcctgaaggagaaagactgcgaaaaaggctttattttggatggtttcccgcgtaccgtgcgccaagcggaatatctgcctagttttcttgaaagccagggccgccagttgacagccgccgtgctgattgaggtccccgaagatgaagttgttgcacgtctgctgtctcgccgtgtttgtccgaaatgcgggcgtagttacaacatgatttttctgccaccaaaagaagacgagctgtgtgacgattgcggtgtcagcttagtacagcgtttagatgataaggaagaaacggtccgtatgcgcctgaaagtctaccgtgagaagacccagccggtcattgactattatagtaagaaaggtattctcgcacgcgtagatgggagccaagaaatcatgcctatcgtggcagaagtcctggggattctgggttggagcgataag

SEQ ID NO: 2958 - protein, 231 aa, synthetic construct
  REGION 1..231: note = variant of adenylate kinase from Thermotoga neapolitana
MHHHHHHGGSGMGAYLVLLGPPGAGKGTQGRIISAKTGIPHISTGDILRQIVAKQNDEVASSIKEWMLKGELVPDEIGNPVVKRRLKEKDCEKGFILDGFPRTVRQAEYLPSFLESQGRQLTAAVLIEVPEDEVVARLLSRRVCPKCGRSYNMIFLPPKEDELCDDCGVSLVQRLDDKEETVRMRLKVYREKTQPVIDYYSKKGILARVDGSQEIMPIVAEVLGILGWSDK

SEQ ID NO: 2959 - DNA, 693 bp, synthetic construct
  misc_feature 1..693: note = variant of adenylate kinase from Thermotoga neapolitana
  source 1..693: mol_type = other DNA
atgcaccatcatcaccatcacgggggctccggcatgggggcatatctggtgttattaggtccgccgggcgcgggaaaaggtacccaaggccgtattatttcggcaaagactggcatcccgcatattagcacgggcgatatcctgcgtgtgatcgtcgctaagcaaaacgatgaagttgcctcgagcattaaagagtggatgctgaaaggtgaactcgttccagatgaaattggtaatcctgtagtaaaacgccgcctgaaggagaaagactgcgaaaaaggctttattttggatggtttcccgcgtaccgtgcgccaagcggaatatctggatagttttcttgaaagccagggccgccagttgacagccgccgtgctgattgaggtccccgaagatgaagttgttgcacgtctgctgtctcgccgtgtttgtccgaaatgcgggcgtagttacaacatgatttttctgccaccaaaagaagacgagctgtgtgacgattgcggtgtcagcttagtacagcgtttagatgataaggaagaaacggtccgtatgcgcctgaaagtctaccgtgagaagacccagccggtcattgactattatagtaagaaaggtattctcgcacgcgtagatgggagccaagaaatcatgcctatcgtggcagaagtcctggggattctgggttggagcgataag

SEQ ID NO: 2960 - protein, 231 aa, synthetic construct
  REGION 1..231: note = variant of adenylate kinase from Thermotoga neapolitana
MHHHHHHGGSGMGAYLVLLGPPGAGKGTQGRIISAKTGIPHISTGDILRVIVAKQNDEVASSIKEWMLKGELVPDEIGNPVVKRRLKEKDCEKGFILDGFPRTVRQAEYLDSFLESQGRQLTAAVLIEVPEDEVVARLLSRRVCPKCGRSYNMIFLPPKEDELCDDCGVSLVQRLDDKEETVRMRLKVYREKTQPVIDYYSKKGILARVDGSQEIMPIVAEVLGILGWSDK

SEQ ID NO: 2961 - DNA, 693 bp, synthetic construct
  misc_feature 1..693: note = variant of adenylate kinase from Thermotoga neapolitana
  source 1..693: mol_type = other DNA
atgcaccatcatcaccatcacgggggctccggcatgggggcatatctggtgttattaggtccgccgggcgcgggaaaaggtacccaaggccgtattatttcggcaaagactggcatcccgcatattagcacgggcgatatcctgcgtcagatcgtcgctaagcaaaacgatgaagttgcctcgagcattaaagagtggatgctgaaaggtgaactcgttccagatgaaattggtaatcctgtagtaaaacgccgcctgaaggagaaagactgcgaaaaaggctttattttggatggtttcccgcgtacccggcgccaagcggaatatctggatagttttcttgaaagccagggccgccagttgacagccgccgtgctgattgaggtccccgaagatgaagttgttgcacgtctgctgtctcgccgtgtttgtccgaaatgcgggcgtagttacaacatgatttttctgccaccaaaagaagacgagctgtgtgacgattgcggtgtcagcttagtacagcgtttagatgataaggaagaaacggtccgtatgcgcctgaaagtctaccgtgagaagacccagccggtcattgactattatagtaagaaaggtattctcgcacgcgtagatgggagccaagaaatcatgcctatcgtggcagaagtcctggggattctgggttggagcgataag

SEQ ID NO: 2962 - protein, 231 aa, synthetic construct
  REGION 1..231: note = variant of adenylate kinase from Thermotoga neapolitana
MHHHHHHGGSGMGAYLVLLGPPGAGKGTQGRIISAKTGIPHISTGDILRQIVAKQNDEVASSIKEWMLKGELVPDEIGNPVVKRRLKEKDCEKGFILDGFPRTRRQAEYLDSFLESQGRQLTAAVLIEVPEDEVVARLLSRRVCPKCGRSYNMIFLPPKEDELCDDCGVSLVQRLDDKEETVRMRLKVYREKTQPVIDYYSKKGILARVDGSQEIMPIVAEVLGILGWSDK

SEQ ID NO: 2963 - DNA, 693 bp, synthetic construct
  misc_feature 1..693: note = variant of adenylate kinase from Thermotoga neapolitana
  source 1..693: mol_type = other DNA
atgcaccatcatcaccatcacgggggctccggcatgggggcatatctggtgttattaggtccgccgggcgcgggaaaaggtacccaaggccgtattatttcggcaaagactggcatcccgcatattagcacgggcgatatcctgcgtcagatcgtcgctaagcaaaacgatgaagttgcctcgagcattaaagagtggatgctgaaaggtgaactcgttccagatgaaattggtaatcctgtagtaaaacgccgcctgaaggagaaagactgcgaaaaaggctttattttggatggtttcccgcgtaccgtgcgccaagcggaatatctggatagttttcttgaaagccagggccgccagttgacagccgccgtgctgattgaggtccccgaagatgaagttgttgcacgtctgctgtctcgccgtgtttgtccgaaatgcgggcgtagttacaacatgatttttctgccaccaaaagaagacgagctgtgtgacgattgcggtgtcagcttagtacagcgtttagatgataaggaagaaacggtccgtatgcgcctgaaagtctaccgtgagaagacccagattgtcattgactattatagtaagaaaggtattctcgcacgcgtagatgggagccaagaaatcatgcctatcgtggcagaagtcctggggattctgggttggagcgataag

SEQ ID NO: 2964 - protein, 231 aa, synthetic construct
  REGION 1..231: note = variant of adenylate kinase from Thermotoga neapolitana
MHHHHHHGGSGMGAYLVLLGPPGAGKGTQGRIISAKTGIPHISTGDILRQIVAKQNDEVASSIKEWMLKGELVPDEIGNPVVKRRLKEKDCEKGFILDGFPRTVRQAEYLDSFLESQGRQLTAAVLIEVPEDEVVARLLSRRVCPKCGRSYNMIFLPPKEDELCDDCGVSLVQRLDDKEETVRMRLKVYREKTQIVIDYYSKKGILARVDGSQEIMPIVAEVLGILGWSDK

SEQ ID NO: 2965 - DNA, 693 bp, synthetic construct
  misc_feature 1..693: note = variant of adenylate kinase from Thermotoga neapolitana
  source 1..693: mol_type = other DNA
atgcaccatcatcaccatcacgggggctccggcatgggggcatatctggtgttattaggtccgccgggcgcgggaaaaggtacccaaggccgtattatttcggcaaagtttggcatcccgcatattagcacgggcgatatcctgcgtcagatcgtcgctaagcaaaacgatgaagttgcctcgagcattaaagagtggatgctgaaaggtgaactcgttccagatgaaattggtaatcctgtagtaaaacgccgcctgaaggagaaagactgcgaaaaaggctttattttggatggtttcccgcgtaccgtgcgccaagcggaatatctggatagttttcttgaaagccagggccgccagttgacagccgccgtgctgattgaggtccccgaagatgaagttgttgcacgtctgctgtctcgccgtgtttgtccgaaatgcgggcgtagttacaacatgatttttctgccaccaaaagaagacgagctgtgtgacgattgcggtgtcagcttagtacagcgtttagatgataaggaagaaacggtccgtatgcgcctgaaagtctaccgtgagaagacccagccggtcattgactattatagtaagaaaggtattctcgcacgcgtagatgggagccaagaaatcatgcctatcgtggcagaagtcctggggattctgggttggagcgataag

SEQ ID NO: 2966 - protein, 231 aa, synthetic construct
  REGION 1..231: note = variant of adenylate kinase from Thermotoga neapolitana
MHHHHHHGGSGMGAYLVLLGPPGAGKGTQGRIISAKFGIPHISTGDILRQIVAKQNDEVASSIKEWMLKGELVPDEIGNPVVKRRLKEKDCEKGFILDGFPRTVRQAEYLDSFLESQGRQLTAAVLIEVPEDEVVARLLSRRVCPKCGRSYNMIFLPPKEDELCDDCGVSLVQRLDDKEETVRMRLKVYREKTQPVIDYYSKKGILARVDGSQEIMPIVAEVLGILGWSDK

SEQ ID NO: 2967 - DNA, 693 bp, synthetic construct
  misc_feature 1..693: note = variant of adenylate kinase from Thermotoga neapolitana
  source 1..693: mol_type = other DNA
atgcaccatcatcaccatcacgggggctccggcatgggggcatatctggtgttattaggtccgccgggcgcgggaaaaggtacccaaggccgtattatttcggcaaagactggcatcccgcatattagcacgggcgatatcctgcgtcagatcgtcgctaagcaaaacgatgaagttgcctcgagcattaaagagtggatgctgaaaggtgaactcgttccagatgaaattggtaatcctgtagtaaaacgccgcctgaaggagaaagactgcgaaaaaggctttattttggatggtttcccgcgtaccgtgcgccaagcggaatatctggatagttttcttgaaagccagggccctcagttgacagccgccgtgctgattgaggtccccgaagatgaagttgttgcacgtctgctgtctcgccgtgtttgtccgaaatgcgggcgtagttacaacatgatttttctgccaccaaaagaagacgagctgtgtgacgattgcggtgtcagcttagtacagcgtttagatgataaggaagaaacggtccgtatgcgcctgaaagtctaccgtgagaagacccagccggtcattgactattatagtaagaaaggtattctcgcacgcgtagatgggagccaagaaatcatgcctatcgtggcagaagtcctggggattctgggttggagcgataag

SEQ ID NO: 2968 - protein, 231 aa, synthetic construct
  REGION 1..231: note = variant of adenylate kinase from Thermotoga neapolitana
MHHHHHHGGSGMGAYLVLLGPPGAGKGTQGRIISAKTGIPHISTGDILRQIVAKQNDEVASSIKEWMLKGELVPDEIGNPVVKRRLKEKDCEKGFILDGFPRTVRQAEYLDSFLESQGPQLTAAVLIEVPEDEVVARLLSRRVCPKCGRSYNMIFLPPKEDELCDDCGVSLVQRLDDKEETVRMRLKVYREKTQPVIDYYSKKGILARVDGSQEIMPIVAEVLGILGWSDK

SEQ ID NO: 2969 - DNA, 693 bp, synthetic construct
  misc_feature 1..693: note = variant of adenylate kinase from Thermotoga neapolitana
  source 1..693: mol_type = other DNA
atgcaccatcatcaccatcacgggggctccggcatgggggcatatctggtgttattaggtccgccgggcgcgggaaaaggtacccaaggccgtattatttcggcaaagactggcatcccgcatattagcacgggcgatatcctgcgtcagatcgtcgctaagcaaaacgatgaagttgcctcgagcattaaagagtggatgctgaaaggtgaactcgttccagatgaaattggtaatcctgtagtaaaacgccgcctgaaggagaaagactgcgaaaaagtttttattttggatggtttcccgcgtaccgtgcgccaagcggaatatctggatagttttcttgaaagccagggccgccagttgacagccgccgtgctgattgaggtccccgaagatgaagttgttgcacgtctgctgtctcgccgtgtttgtccgaaatgcgggcgtagttacaacatgatttttctgccaccaaaagaagacgagctgtgtgacgattgcggtgtcagcttagtacagcgtttagatgataaggaagaaacggtccgtatgcgcctgaaagtctaccgtgagaagacccagccggtcattgactattatagtaagaaaggtattctcgcacgcgtagatgggagccaagaaatcatgcctatcgtggcagaagtcctggggattctgggttggagcgataag

SEQ ID NO: 2970 - protein, 231 aa, synthetic construct
  REGION 1..231: note = variant of adenylate kinase from Thermotoga neapolitana
MHHHHHHGGSGMGAYLVLLGPPGAGKGTQGRIISAKTGIPHISTGDILRQIVAKQNDEVASSIKEWMLKGELVPDEIGNPVVKRRLKEKDCEKVFILDGFPRTVRQAEYLDSFLESQGRQLTAAVLIEVPEDEVVARLLSRRVCPKCGRSYNMIFLPPKEDELCDDCGVSLVQRLDDKEETVRMRLKVYREKTQPVIDYYSKKGILARVDGSQEIMPIVAEVLGILGWSDK

SEQ ID NO: 2971 - DNA, 693 bp, synthetic construct
  misc_feature 1..693: note = variant of adenylate kinase from Thermotoga neapolitana
  source 1..693: mol_type = other DNA
atgcaccatcatcaccatcacgggggctccggcatgggggcatatctggtgttattaggtccgccgggcgcgggaaaaggtacccaaggccgtattatttcggcaaagactggcatcccgcatattagcacgggcgatatcctgcgtcagatcgtcgctaagcaaaacgatgaagttgcctcgagcattaaagagtggatgctgaaaggtgaactcgttccagatgaaattggtaatcctgtagtaaaacgccgcctgaaggagaaagactgcgaaaaaggctttattttggatggtttcccgcgtaccgtgcgccaagcggaatatctggatagttttcttgaaagccagggccgccagttgacagccgccgtgctgattgaggtccccgaagatgaagttgttgcacgtctgctgtctcgccgtgtttgtccgaaatgcgggcgtagttacaacatgatttttctgccaccaaaagaagacgagctgtgtgacttgtgcggtgtcagcttagtacagcgtttagatgataaggaagaaacggtccgtatgcgcctgaaagtctaccgtgagaagacccagccggtcattgactattatagtaagaaaggtattctcgcacgcgtagatgggagccaagaaatcatgcctatcgtggcagaagtcctggggattctgggttggagcgataag

SEQ ID NO: 2972 - protein, 231 aa, synthetic construct
  REGION 1..231: note = variant of adenylate kinase from Thermotoga neapolitana
MHHHHHHGGSGMGAYLVLLGPPGAGKGTQGRIISAKTGIPHISTGDILRQIVAKQNDEVASSIKEWMLKGELVPDEIGNPVVKRRLKEKDCEKGFILDGFPRTVRQAEYLDSFLESQGRQLTAAVLIEVPEDEVVARLLSRRVCPKCGRSYNMIFLPPKEDELCDLCGVSLVQRLDDKEETVRMRLKVYREKTQPVIDYYSKKGILARVDGSQEIMPIVAEVLGILGWSDK

SEQ ID NO: 2973 - DNA, 693 bp, synthetic construct
  misc_feature 1..693: note = variant of adenylate kinase from Thermotoga neapolitana
  source 1..693: mol_type = other DNA
atgcaccatcatcaccatcacgggggctccggcatgggggcatatctggtgttattaggtccgccgggcgcgggaaaaggtacccaaggccgtattatttcggcaaagactggcatcccgcatattagcacgggcgatatcctgcgtcagatcgtcgctaagcaaaacgatgaagttgcctcgagcattaaagagtggatgctgaaaggtgaactcgttccagatgaaattggtaatcctgtagtaaaacgccgcctgaaggagaaagactgcgaaaaaggctttattttggatggtttcccgcgtaccgtgcgccaagcggaatatctggatagttttcttgaaagccagggccgccagttgacagccgccgtgctgattgaggtccccgaagatgaagttgttgcacgtctgctgtctcgccgtgtttgtccgaaatgcgggcgtagttacaacatgatttttctgccaccaaaagaagacgagctgtgtgacgattgcggttatagcttagtacagcgtttagatgataaggaagaaacggtccgtatgcgcctgaaagtctaccgtgagaagacccagccggtcattgactattatagtaagaaaggtattctcgcacgcgtagatgggagccaagaaatcatgcctatcgtggcagaagtcctggggattctgggttggagcgataag

SEQ ID NO: 2974 - protein, 231 aa, synthetic construct
  REGION 1..231: note = variant of adenylate kinase from Thermotoga neapolitana
MHHHHHHGGSGMGAYLVLLGPPGAGKGTQGRIISAKTGIPHISTGDILRQIVAKQNDEVASSIKEWMLKGELVPDEIGNPVVKRRLKEKDCEKGFILDGFPRTVRQAEYLDSFLESQGRQLTAAVLIEVPEDEVVARLLSRRVCPKCGRSYNMIFLPPKEDELCDDCGYSLVQRLDDKEETVRMRLKVYREKTQPVIDYYSKKGILARVDGSQEIMPIVAEVLGILGWSDK

SEQ ID NO: 2975 - DNA, 693 bp, synthetic construct
  misc_feature 1..693: note = variant of adenylate kinase from Thermotoga neapolitana
  source 1..693: mol_type = other DNA
atgcaccatcatcaccatcacgggggctccggcatgggggcatatctggtgttattaggtccgccgggcgcgggaaaaggtacccaaggccgtattatttcggcaaagactggcatcccgcatattagcacgggcgatatcctgcgtcagatcgtcgctaagcaaaacgatgaagttgcctcgagcattaaagagtggatgctgaaaggtgaactcgttccagatgaaattggtaatcctgtagtaaaacgccgcctgaaggagaaagactgcgaaaaaggctttattttggatggtttcccgcgtaccgtgcgccaagcggaatatctggatagttttcttgaaagccagggccgccagttgacagccgccgtgctgattgaggtccccgaattggaagttgttgcacgtctgctgtctcgccgtgtttgtccgaaatgcgggcgtagttacaacatgatttttctgccaccaaaagaagacgagctgtgtgacgattgcggtgtcagcttagtacagcgtttagatgataaggaagaaacggtccgtatgcgcctgaaagtctaccgtgagaagacccagccggtcattgactattatagtaagaaaggtattctcgcacgcgtagatgggagccaagaaatcatgcctatcgtggcagaagtcctggggattctgggttggagcgataag

SEQ ID NO: 2976 - protein, 231 aa, synthetic construct
  REGION 1..231: note = variant of adenylate kinase from Thermotoga neapolitana
MHHHHHHGGSGMGAYLVLLGPPGAGKGTQGRIISAKTGIPHISTGDILRQIVAKQNDEVASSIKEWMLKGELVPDEIGNPVVKRRLKEKDCEKGFILDGFPRTVRQAEYLDSFLESQGRQLTAAVLIEVPELEVVARLLSRRVCPKCGRSYNMIFLPPKEDELCDDCGVSLVQRLDDKEETVRMRLKVYREKTQPVIDYYSKKGILARVDGSQEIMPIVAEVLGILGWSDK

SEQ ID NO: 2977 - DNA, 693 bp, synthetic construct
  misc_feature 1..693: note = variant of adenylate kinase from Thermotoga neapolitana
  source 1..693: mol_type = other DNA
atgcaccatcatcaccatcacgggggctccggcatgggggcatatctggtgttattaggtccgccgggcgcgggaaaaggtacccaaggccgtattatttcggcaaagactggcatcccgcatattagcacgggcgatatcctgcgtcagatcgtcgctaagcaaaacgatgaagttgcctcgagcattaaagagtggatgctgaaaggtgaactcgttccagatgaaattggtaatcctgtagtaaaacgccgcctgaaggagaaagactgcgaaaaaggctttattttggatggtttcccgcgtaccgtgcgccaagcggaatatctggatagttttcttgaaagccagggccgccagttgacagccgccgtgctgattgaggtccccgaagatgaagttgttgcacgtctgctgtctcgccgtgtttgtccgaaatgcgggcgtagttacaacatgatttttctgccaccaaaagaagacgagctgtgtgacgattgcggtgtcagcttagtacagcgtttagatgataaggaagaaacggtccgtatgcgcctgaaagtctaccgtgagcatacccagccggtcattgactattatagtaagaaaggtattctcgcacgcgtagatgggagccaagaaatcatgcctatcgtggcagaagtcctggggattctgggttggagcgataag

SEQ ID NO: 2978 - protein, 231 aa, synthetic construct
  REGION 1..231: note = variant of adenylate kinase from Thermotoga neapolitana
MHHHHHHGGSGMGAYLVLLGPPGAGKGTQGRIISAKTGIPHISTGDILRQIVAKQNDEVASSIKEWMLKGELVPDEIGNPVVKRRLKEKDCEKGFILDGFPRTVRQAEYLDSFLESQGRQLTAAVLIEVPEDEVVARLLSRRVCPKCGRSYNMIFLPPKEDELCDDCGVSLVQRLDDKEETVRMRLKVYREHTQPVIDYYSKKGILARVDGSQEIMPIVAEVLGILGWSDK

SEQ ID NO: 2979 - DNA, 693 bp, synthetic construct
  misc_feature 1..693: note = variant of adenylate kinase from Thermotoga neapolitana
  source 1..693: mol_type = other DNA
atgcaccatcatcaccatcacgggggctccggcatgggggcatatctggtgttattaggtccgccgggcgcgggaaaaggtacccaaggccgtattatttcggcaaagactggcatcccgcatattagcacgggcgatatcctgcgtcagatcgtcgctaagcaaaacgatgaagttgcctcgagcattaaagagtggatgctgaaaggtgaactcgttccagatgaaattggtaatcctgtagtaaaacgccgcctgaaggagaaagactgcgaaaaaggctttattattgatggtttcccgcgtaccgtgcgccaagcggaatatctggatagttttcttgaaagccagggccgccagttgacagccgccgtgctgattgaggtccccgaagatgaagttgttgcacgtctgctgtctcgccgtgtttgtccgaaatgcgggcgtagttacaacatgatttttctgccaccaaaagaagacgagctgtgtgacgattgcggtgtcagcttagtacagcgtttagatgataaggaagaaacggtccgtatgcgcctgaaagtctaccgtgagaagacccagccggtcattgactattatagtaagaaaggtattctcgcacgcgtagatgggagccaagaaatcatgcctatcgtggcagaagtcctggggattctgggttggagcgataag

SEQ ID NO: 2980 - protein, 231 aa, synthetic construct
  REGION 1..231: note = variant of adenylate kinase from Thermotoga neapolitana
MHHHHHHGGSGMGAYLVLLGPPGAGKGTQGRIISAKTGIPHISTGDILRQIVAKQNDEVASSIKEWMLKGELVPDEIGNPVVKRRLKEKDCEKGFIIDGFPRTVRQAEYLDSFLESQGRQLTAAVLIEVPEDEVVARLLSRRVCPKCGRSYNMIFLPPKEDELCDDCGVSLVQRLDDKEETVRMRLKVYREKTQPVIDYYSKKGILARVDGSQEIMPIVAEVLGILGWSDK

SEQ ID NO: 2981 - DNA, 693 bp, synthetic construct
  misc_feature 1..693: note = variant of adenylate kinase from Thermotoga neapolitana
  source 1..693: mol_type = other DNA
atgcaccatcatcaccatcacgggggctccggcatgggggcatatctggtgttattaggtccgccgggcgcgggaaaaggtacccaaggccgtattatttcggcaaagactggcatcccgcatattagcacgggcgatatcctgcgtcagatcgtcgctaagcaaaacgatgaagttgcctcgagcattaaagagtggatgctgaaaggtgaactcgttccagatgaaattggtaatcctgtagtaaaacgccgcctgaaggagttggactgcgaaaaaggctttattttggatggtttcccgcgtaccgtgcgccaagcggaatatctggatagttttcttgaaagccagggccgccagttgacagccgccgtgctgattgaggtccccgaagatgaagttgttgcacgtctgctgtctcgccgtgtttgtccgaaatgcgggcgtagttacaacatgatttttctgccaccaaaagaagacgagctgtgtgacgattgcggtgtcagcttagtacagcgtttagatgataaggaagaaacggtccgtatgcgcctgaaagtctaccgtgagaagacccagccggtcattgactattatagtaagaaaggtattctcgcacgcgtagatgggagccaagaaatcatgcctatcgtggcagaagtcctggggattctgggttggagcgataag

SEQ ID NO: 2982 - protein, 231 aa, synthetic construct
  REGION 1..231: note = variant of adenylate kinase from Thermotoga neapolitana
MHHHHHHGGSGMGAYLVLLGPPGAGKGTQGRIISAKTGIPHISTGDILRQIVAKQNDEVASSIKEWMLKGELVPDEIGNPVVKRRLKELDCEKGFILDGFPRTVRQAEYLDSFLESQGRQLTAAVLIEVPEDEVVARLLSRRVCPKCGRSYNMIFLPPKEDELCDDCGVSLVQRLDDKEETVRMRLKVYREKTQPVIDYYSKKGILARVDGSQEIMPIVAEVLGILGWSDK

SEQ ID NO: 2983 - DNA, 693 bp, synthetic construct
  misc_feature 1..693: note = variant of adenylate kinase from Thermotoga neapolitana
  source 1..693: mol_type = other DNA
atgcaccatcatcaccatcacgggggctccggcatgggggcatatctggtgttattaggtccgccgggcgcgggaaaaggtacccaaggccgtattatttcggcaaagactggcatcccgcatattagcacgggcgatatcctgcgtcagatcgtcgctaagcaaaacgatgaagttgcctcgagcattaaagagtggatgctgaaaggtgaactcgttccagatgaaattggtaatcctgtagtaaaacgccgcctgaaggagaaagactgcgaaaaaggctttattttggatggtttcccgcgtaccgtgcgccaagcggaatatctggatagttttcttgaaagccagggccgccagttgacagccgccgtgctgattgaggtccccgaagatgaagttgttgcacgtctgctgtctcgccgtgtttgtccgaaatgcgggcgtagttacaacatgatttttctgccaccaaaagaagacgagctgtgtgacgattgcggtgtcagcttagtacagcgtttagatgataaggaagaaacggtccgtatgcgcctgaaagtctaccgtgagaagacccagccggtcattgactatgctagtaagaaaggtattctcgcacgcgtagatgggagccaagaaatcatgcctatcgtggcagaagtcctggggattctgggttggagcgataag

SEQ ID NO: 2984 - protein, 231 aa, synthetic construct
  REGION 1..231: note = variant of adenylate kinase from Thermotoga neapolitana
MHHHHHHGGSGMGAYLVLLGPPGAGKGTQGRIISAKTGIPHISTGDILRQIVAKQNDEVASSIKEWMLKGELVPDEIGNPVVKRRLKEKDCEKGFILDGFPRTVRQAEYLDSFLESQGRQLTAAVLIEVPEDEVVARLLSRRVCPKCGRSYNMIFLPPKEDELCDDCGVSLVQRLDDKEETVRMRLKVYREKTQPVIDYASKKGILARVDGSQEIMPIVAEVLGILGWSDK

SEQ ID NO: 2985 - DNA, 693 bp, synthetic construct
  misc_feature 1..693: note = variant of adenylate kinase from Thermotoga neapolitana
  source 1..693: mol_type = other DNA
atgcaccatcatcaccatcacgggggctccggcatgggggcatatctggtgttattaggtccgccgggcgcgggaaaaggtacccaaggccgtattatttcggcaaagactggcatcccgcatattagcacgggcgatatcctgcgtcagatcgtcgctaagcaaaacgatgaagttgcctcgagcattaaagagtggatgctgaaaggtgaactcgttccagatgaaattggtaatcctgtagtaaaacgccgcctgaaggagaaagactgcgaaaaaggctttattttggatggtttcccgcgtaccgtgcgccaagcggaatattttgatagttttcttgaaagccagggccgccagttgacagccgccgtgctgattgaggtccccgaagatgaagttgttgcacgtctgctgtctcgccgtgtttgtccgaaatgcgggcgtagttacaacatgatttttctgccaccaaaagaagacgagctgtgtgacgattgcggtgtcagcttagtacagcgtttagatgataaggaagaaacggtccgtatgcgcctgaaagtctaccgtgagaagacccagccggtcattgactattatagtaagaaaggtattctcgcacgcgtagatgggagccaagaaatcatgcctatcgtggcagaagtcctggggattctgggttggagcgataag

SEQ ID NO: 2986 - protein, 231 aa, synthetic construct
  REGION 1..231: note = variant of adenylate kinase from Thermotoga neapolitana
MHHHHHHGGSGMGAYLVLLGPPGAGKGTQGRIISAKTGIPHISTGDILRQIVAKQNDEVASSIKEWMLKGELVPDEIGNPVVKRRLKEKDCEKGFILDGFPRTVRQAEYFDSFLESQGRQLTAAVLIEVPEDEVVARLLSRRVCPKCGRSYNMIFLPPKEDELCDDCGVSLVQRLDDKEETVRMRLKVYREKTQPVIDYYSKKGILARVDGSQEIMPIVAEVLGILGWSDK

SEQ ID NO: 2987 - DNA, 693 bp, synthetic construct
  misc_feature 1..693: note = variant of adenylate kinase from Thermotoga neapolitana
  source 1..693: mol_type = other DNA
atgcaccatcatcaccatcacgggggctccggcatgggggcatatctggtgttattaggtccgccgggcgcgggaaaaggtacccaaggccgtattatttcggcaaagactggcatcccgcatattagcacgggcgatatcctgcgtcagatcgtcgctaagcaaaacgatgaagttgcctcgagcattaaagagtggatgctgaaaggtgaactcgttccagatgaaattggtaatcctgtagtaaaacgccgcctgaaggagaaagactgcgaaaaaggctttattttggatggtttcccgcgtaccgtgcgccaagcggaatatctggatagttttcttgaaagccagctgcgccagttgacagccgccgtgctgattgaggtccccgaagatgaagttgttgcacgtctgctgtctcgccgtgtttgtccgaaatgcgggcgtagttacaacatgatttttctgccaccaaaagaagacgagctgtgtgacgattgcggtgtcagcttagtacagcgtttagatgataaggaagaaacggtccgtatgcgcctgaaagtctaccgtgagaagacccagccggtcattgactattatagtaagaaaggtattctcgcacgcgtagatgggagccaagaaatcatgcctatcgtggcagaagtcctggggattctgggttggagcgataag

SEQ ID NO: 2988 - protein, 231 aa, synthetic construct
  REGION 1..231: note = variant of adenylate kinase from Thermotoga neapolitana
MHHHHHHGGSGMGAYLVLLGPPGAGKGTQGRIISAKTGIPHISTGDILRQIVAKQNDEVASSIKEWMLKGELVPDEIGNPVVKRRLKEKDCEKGFILDGFPRTVRQAEYLDSFLESQLRQLTAAVLIEVPEDEVVARLLSRRVCPKCGRSYNMIFLPPKEDELCDDCGVSLVQRLDDKEETVRMRLKVYREKTQPVIDYYSKKGILARVDGSQEIMPIVAEVLGILGWSDK

SEQ ID NO: 2989 - DNA, 693 bp, synthetic construct
  misc_feature 1..693: note = variant of adenylate kinase from Thermotoga neapolitana
  source 1..693: mol_type = other DNA
atgcaccatcatcaccatcacgggggctccggcatgggggcatatctggtgttattaggtccgccgggcgcgggaaaaggtacccaaggccgtattatttcggcaaagactggcatcccgcatattagcacgggcgatatcctgcgtaacatcgtcgctaagcaaaacgatgaagttgcctcgagcattaaagaatggatgctgaaaggtgaactcgttccagatgaaattggtaatcctgtagtaaaacgccgcctgaaggagaaagactgcgaaaaaggctttattttggatggtttcccgcgtaccgcccgtcaagcggaatatctggatagttttcttgaatcgcagggccgccagttgacagccgccgtgctgctggaggtccccgaagatgaagttgttgtgcgtctgctgtctcgccgtgtttgtccgaaatgcgggcgtagttacaacatgatttttctgccaccaaaagaagacgagctgtgtgacgattgcggtgtcagtttagtacagcgtttcgatgataaggaagaaacggtccgtatgcgcctgaaagtctaccgtgagaagacccagccggtcattgactattatagtaagaaaggtattctcgcacgcgtagatgggagccaagaaatcatgcctatcgtggcagaagtcctggggattctgggttggagcgataag

SEQ ID NO: 2990 - protein, 231 aa, synthetic construct
  REGION 1..231: note = variant of adenylate kinase from Thermotoga neapolitana
MHHHHHHGGSGMGAYLVLLGPPGAGKGTQGRIISAKTGIPHISTGDILRNIVAKQNDEVASSIKEWMLKGELVPDEIGNPVVKRRLKEKDCEKGFILDGFPRTARQAEYLDSFLESQGRQLTAAVLLEVPEDEVVVRLLSRRVCPKCGRSYNMIFLPPKEDELCDDCGVSLVQRFDDKEETVRMRLKVYREKTQPVIDYYSKKGILARVDGSQEIMPIVAEVLGILGWSDK

SEQ ID NO: 2991 - DNA, 693 bp, synthetic construct
  misc_feature 1..693: note = variant of adenylate kinase from Thermotoga neapolitana
  source 1..693: mol_type = other DNA
atgcaccatcatcaccatcacgggggctccggcatgggggcatatctggtgttattaggtccgccgggcgcgggaaaaggtacccaaggccgtattatttcggcaagcactggcatcccgcatattagcacgggcgatatcctgcgtcagatcgtcgctaagcaaaacgatgaagttgcctcgagcattaaagaatggatgctgaaaggtgaactcgttccagatgaaattggtaatcctgtagtaaaacgccgcctgaaggagaaagactgcgaaaaaggctttattttggatggtttcccgcgtaccgcccgtcaagcggaatatctggatagttttcttgaatcgcagggccgccagttgacagccgccgtgctgctggaggtccccgaagatgaagttgttgtgcgtctgctgtctcgccgtgtttgtccgaaatgcgggcgtagttacaacatgatttttctgccaccaaaagaagacgagctgtgtgacgattgcggtgtcagtttagtacagcgtttcgatgataaggaagaaacggtccgtatgcgcctgaaagtctaccgtgagaagacccagccggtcattgactattatagtaagaaaggtattctcgcacgcgtagatgggagccaagaaatcatgcctatcgtggcagaagtcctggggattctgggttggagcgataag

SEQ ID NO: 2992 - protein, 231 aa, synthetic construct
  REGION 1..231: note = variant of adenylate kinase from Thermotoga neapolitana
MHHHHHHGGSGMGAYLVLLGPPGAGKGTQGRIISASTGIPHISTGDILRQIVAKQNDEVASSIKEWMLKGELVPDEIGNPVVKRRLKEKDCEKGFILDGFPRTARQAEYLDSFLESQGRQLTAAVLLEVPEDEVVVRLLSRRVCPKCGRSYNMIFLPPKEDELCDDCGVSLVQRFDDKEETVRMRLKVYREKTQPVIDYYSKKGILARVDGSQEIMPIVAEVLGILGWSDK

SEQ ID NO: 2993 - DNA, 693 bp, synthetic construct
  misc_feature 1..693: note = variant of adenylate kinase from Thermotoga neapolitana
  source 1..693: mol_type = other DNA
atgcaccatcatcaccatcacgggggctccggcatgggggcatatctggtgttattaggtccgccgggcgcgggaaaaggtacccaaggccgtattatttcggcaaagactggcatcccgcatattagcacgggcgatatcctgcgtcagatcgtcgctaagcaaaacgatgaagttgcctcgagcattaaagaatggatgctgaaaggtgaactcgttccagatgaaattggtaatcctgtagtaaaacgccgcctgaaggagaaagattgcgaaaaaggctttattttggatggtttcccgcgtaccgcgcgtcaagcggaatatctggatagttttcttgaatcgcagggccgccagttgacagccgccgtgctgctggaggtccccgaagatgaagttgttgtgcgtctgctgtctcgccgtgtttgtccgaaatgcgggcgtagttttaacatgatttttctggtgccaaaagaagacgagctgtgtgacgattgcggtgtcagtttagtacagcgtttcgatgataaggaagaaacggtccgtatgcgcctgaaagtctaccgtgagaagacccagccggtcattgactattatagtaagaaaggtattctcgcacgcgtagatgggagccaagaaatcatgcctatcgtggcagaagtcctggggattctgggttggagcgataag

SEQ ID NO: 2994 - protein, 231 aa, synthetic construct
  REGION 1..231: note = variant of adenylate kinase from Thermotoga neapolitana
MHHHHHHGGSGMGAYLVLLGPPGAGKGTQGRIISAKTGIPHISTGDILRQIVAKQNDEVASSIKEWMLKGELVPDEIGNPVVKRRLKEKDCEKGFILDGFPRTARQAEYLDSFLESQGRQLTAAVLLEVPEDEVVVRLLSRRVCPKCGRSFNMIFLVPKEDELCDDCGVSLVQRFDDKEETVRMRLKVYREKTQPVIDYYSKKGILARVDGSQEIMPIVAEVLGILGWSDK

SEQ ID NO: 2995 - DNA, 693 bp, synthetic construct
  misc_feature 1..693: note = variant of adenylate kinase from Thermotoga neapolitana
  source 1..693: mol_type = other DNA
atgcaccatcatcaccatcacgggggctccggcatgggggcatatctggtgttattaggtccgccgggcgcgggaaaaggtacccaaggccgtattatttcggcaaagactggcatcccgcatattagcacgggcgatatcctgcgtcagatcgtcgctaagcaaaacgatgaagttgcctcgagcattaaagaatggatgctgaaaggtgaactcgttccagatgaaattggtaatcctgtagtaaaacgccgcctgaaggagaaagattgcgaaaaaggctttattttggatggtttcccgcgtaccgcccgtcaagcggaatatctggatagttttcttgaatcgcagggccgccagttgacagccgccgtgctgctggaggtccccgaagatgaagttgttgtgcgtctgctgtctcgccgtgtttgtccgaaatgcgggcgtagttacaacatgatttttctgccaccaaaagaagacgagctgtgtgacgattgcggtgtcagtttagtacagcgtttcgatgataaggaagaaacggtccgtatgcgcctgaaagtctaccgtgagaagacccagccggtcattgactattatagtaagaaaggtattctcgcacgcgtagatgggagccaagaaatcgatcctatcgtggcagaagtcctggggattctgggttggagcgataag

SEQ ID NO: 2996 - protein, 231 aa, synthetic construct
  REGION 1..231: note = variant of adenylate kinase from Thermotoga neapolitana
MHHHHHHGGSGMGAYLVLLGPPGAGKGTQGRIISAKTGIPHISTGDILRQIVAKQNDEVASSIKEWMLKGELVPDEIGNPVVKRRLKEKDCEKGFILDGFPRTARQAEYLDSFLESQGRQLTAAVLLEVPEDEVVVRLLSRRVCPKCGRSYNMIFLPPKEDELCDDCGVSLVQRFDDKEETVRMRLKVYREKTQPVIDYYSKKGILARVDGSQEIDPIVAEVLGILGWSDK

SEQ ID NO: 2997 - DNA, 693 bp, synthetic construct
  misc_feature 1..693: note = variant of adenylate kinase from Thermotoga neapolitana
  source 1..693: mol_type = other DNA
atgcaccatcatcaccatcacgggggctccggcatgggggcatatctggtgttattaggtccgccgggcgcgggaaaaggtacccaaggccgtattatttcggcaaagactggcatcccgcatattagcacgggcgatatcctgcgtaacatcgtcgctaagcaaaacgatgaagttgcctcgagcattaaagaatggatgctgaaaggtgaactcgttccagatgaaattggtaatcctgtagtaaaacgccgcctgaaggagaaagactgcgaagtgggctttattttggatggtttcccgcgtaccgcccgtcaagcggaatatctggatagttttcttgaatcgcagggccgccagttgacagccgccgtgctgctggaggtccccgaagatgaagttgttgtgcgtctgctgtctcgccgtgtttgtccgaaatgcgggcgtagttacaacatgatttttctgccaccaaaagaagacgagctgtgtgacgattgcggtgtcagtttagtacagcgtttcgatgataaggaagaaacggtccgtatgcgcctgaaagtctaccgtgagaagacccagccggtcattgactattatagtaagaaaggtattctcgcacgcgtagatgggagccaagaaatcatgcctatcgtggcagaagtcctggggattctgggttggagcgataag

SEQ ID NO: 2998 - protein, 231 aa, synthetic construct
  REGION 1..231: note = variant of adenylate kinase from Thermotoga neapolitana
MHHHHHHGGSGMGAYLVLLGPPGAGKGTQGRIISAKTGIPHISTGDILRNIVAKQNDEVASSIKEWMLKGELVPDEIGNPVVKRRLKEKDCEVGFILDGFPRTARQAEYLDSFLESQGRQLTAAVLLEVPEDEVVVRLLSRRVCPKCGRSYNMIFLPPKEDELCDDCGVSLVQRFDDKEETVRMRLKVYREKTQPVIDYYSKKGILARVDGSQEIMPIVAEVLGILGWSDK

SEQ ID NO: 2999 - DNA, 693 bp, synthetic construct
  misc_feature 1..693: note = variant of adenylate kinase from Thermotoga neapolitana
  source 1..693: mol_type = other DNA
atgcaccatcatcaccatcacgggggctccggcatgggggcatatctggtgttattaggtccgccgggcgcgggaaaaggtacccaaggccgtattatttcggcaaagactggcatcccgcatattagcacgggcgatatcctgcgtcagatcgtcgctaagcaaaacgatgaagttgcctcgagcattaaagaatggatgctgaaaggtgaactcgttccagatgaaattggtaatcctgtagtaaaacgccgcctgaaggagaaaagctgcgaaaaaggctttattttggatggtttcccgcgtacccgccgtcaagcggaatatctggatagttttcttgaatcgcagggccgccagttgacagccgccgtgctgctggaggtccccgaagatgaagttgttgtgcgtctgctgtctcgccgtgtttgtccgaaatgcgggcgtagttacaacatgatttttctgccaccaaaagaagacgagctgtgtgacgattgcggtgtcagtttagtacagcgtttcgatgataaggaagaaacggtccgtatgcgcctgaaagtctaccgtgagaagacccagccggtcattgactattatagtaagaaaggtattctcgcacgcgtagatgggagccaagaaatcatgcctatcgtggcagaagtcctggggattctgggttggagcgataag

SEQ ID NO: 3000 - protein, 231 aa, synthetic construct
  REGION 1..231: note = variant of adenylate kinase from Thermotoga neapolitana
MHHHHHHGGSGMGAYLVLLGPPGAGKGTQGRIISAKTGIPHISTGDILRQIVAKQNDEVASSIKEWMLKGELVPDEIGNPVVKRRLKEKSCEKGFILDGFPRTRRQAEYLDSFLESQGRQLTAAVLLEVPEDEVVVRLLSRRVCPKCGRSYNMIFLPPKEDELCDDCGVSLVQRFDDKEETVRMRLKVYREKTQPVIDYYSKKGILARVDGSQEIMPIVAEVLGILGWSDK

SEQ ID NO: 3001 - DNA, 693 bp, synthetic construct
  misc_feature 1..693: note = variant of adenylate kinase from Thermotoga neapolitana
  source 1..693: mol_type = other DNA
atgcaccatcatcaccatcacgggggctccggcatgggggcatatctggtgttattaggtccgccgggcgcgggaaaaggtacccaaggccgtattatttcggcaagcactggcatcccgcatattagcacgggcgatatcctgcgtaacatcgtcgctaagcaaaacgatgaagttgcctcgagcattaaagaatggatgctgaaaggtgaactcgttccagatgaaattggtaatcctgtagtaaaacgccgcctgaaggagctggactgcgaagtgggctttattttggatggtttcccgcgtaccgcccgtcaagcggaatatttagatagttttcttgaatcgcagggccgccagttgacagccgccgtgctgctggaggtccccgaagatgaagttgttgtgcgtctgcggtctcgccgtgtttgtccgaaatgcgggcgtagttacaacatgatttttctgccaccaaaagaagacgagctgtgtgacgattgcggtgtcagtttagtacagcgtttcgatgataaggaagaaacggtccgtatgcgcctgaaagtctaccgtgagaagacccagccggtcattgactattatagtaagaaaggtattctcgcacgcgtagatgggagccaagaaatcatgcctatcgtggcagaagtcctggggattctgggttggagcgataag

SEQ ID NO: 3002 - protein, 231 aa, synthetic construct
  REGION 1..231: note = variant of adenylate kinase from Thermotoga neapolitana
MHHHHHHGGSGMGAYLVLLGPPGAGKGTQGRIISASTGIPHISTGDILRNIVAKQNDEVASSIKEWMLKGELVPDEIGNPVVKRRLKELDCEVGFILDGFPRTARQAEYLDSFLESQGRQLTAAVLLEVPEDEVVVRLRSRRVCPKCGRSYNMIFLPPKEDELCDDCGVSLVQRFDDKEETVRMRLKVYREKTQPVIDYYSKKGILARVDGSQEIMPIVAEVLGILGWSDK

SEQ ID NO: 3003 - DNA, 693 bp, synthetic construct
  misc_feature 1..693: note = variant of adenylate kinase from Thermotoga neapolitana
  source 1..693: mol_type = other DNA
atgcaccatcatcaccatcacgggggctccggcatgggggcatatctggtgttattaggtccgccgggcgcgggaaaaggtacccaaggccgtattatttcggcaagcactggcatcccgcatattagcacgggcgatatcctgcgtaacatcgtcgctaagcaaaacgatgaagttgcctcgagcattaaagaatggatgctgaaaggtgaactcgttccagatgaaattggtaatcctgtagtaaaacgccgcctgaaggagctggactgcgaagtgggctttattttggatggtttcccgcgtaccgcccgtcaagcggaatattttgatagttttcttgaatcgcagggccgccagttgacagccgccgtgctgctggaggtccccgaagatgaagttgttgtgcgtctgctgtctcgccgtgtttgtccgaaatgcgggcgtagttacaacatgatttttctgccaccaaaagaagacgagctgtgtgacgattgcggtgtcagtttagtacagcgtttcgatgataaggaagaaacggtccgtatgcgcctgaaagtctaccgtgagaagacccagccggtcattgactattatagtaagaaaggtattctcgcacgcgtagatgggagccaagaaatcatgcctatcgtggcagaagtcctggggattctgggttggagcgataag

SEQ ID NO: 3004 - protein, 231 aa, synthetic construct
  REGION 1..231: note = variant of adenylate kinase from Thermotoga neapolitana
MHHHHHHGGSGMGAYLVLLGPPGAGKGTQGRIISASTGIPHISTGDILRNIVAKQNDEVASSIKEWMLKGELVPDEIGNPVVKRRLKELDCEVGFILDGFPRTARQAEYFDSFLESQGRQLTAAVLLEVPEDEVVVRLLSRRVCPKCGRSYNMIFLPPKEDELCDDCGVSLVQRFDDKEETVRMRLKVYREKTQPVIDYYSKKGILARVDGSQEIMPIVAEVLGILGWSDK

SEQ ID NO: 3005 - DNA, 693 bp, synthetic construct
  misc_feature 1..693: note = variant of adenylate kinase from Thermotoga neapolitana
  source 1..693: mol_type = other DNA
atgcaccatcatcaccatcacgggggctccggcatgggggcatatctggtgttattaggtccgccgggcgcgggaaaaggtacccaaggccgtattatttcggcaagcactggcatcccgcatattagcacgggcgatatcctgcgtaacatcgtcgctaagcaaaacgatgaagttgcctcgagcattaaagaatggatgctgaaaggtgaactcgttccagatgaaattggtaatcctgtagtaaaacgccgcctgaaggagaaagactgcgaaaaaggctttattttggatggtttcccgcgtaccgcccgtcaagcggaatatctggatagttttcttgaatcgcagggccgccagttgacagccgccgtgctgctggaggtccccgaagatgaagttgttgtgcgtctgctgtctcgccgtgtttgtccgaaatgcgggcgtagttacaacatgatttttctgccaccaaaagaagacgagctgtgtgacgattgcggtgtcagtttagtacagcgtttcgatgataaggaagaaacggtccgtatgcgcctgaaagtctaccgtgagaagacccagccggtcattgactattatagtaagaaaggtattctcgcacgcgtagatgggagccaagaaatcatgcctatcgtggcagaagtcctggggattctgggttggagcgataag

SEQ ID NO: 3006 - protein, 231 aa, synthetic construct
  REGION 1..231: note = variant of adenylate kinase from Thermotoga neapolitana
MHHHHHHGGSGMGAYLVLLGPPGAGKGTQGRIISASTGIPHISTGDILRNIVAKQNDEVASSIKEWMLKGELVPDEIGNPVVKRRLKEKDCEKGFILDGFPRTARQAEYLDSFLESQGRQLTAAVLLEVPEDEVVVRLLSRRVCPKCGRSYNMIFLPPKEDELCDDCGVSLVQRFDDKEETVRMRLKVYREKTQPVIDYYSKKGILARVDGSQEIMPIVAEVLGILGWSDK

SEQ ID NO: 3007 - DNA, 693 bp, synthetic construct
  misc_feature 1..693: note = variant of adenylate kinase from Thermotoga neapolitana
  source 1..693: mol_type = other DNA
atgcaccatcatcaccatcacgggggctccggcatgggggcatatctggtgttattaggtccgccgggcgcgggaaaaggtacccaaggccgtattatttcggcaaagactggcatcccgcatattagcacgggcgatatcctgcgtcagatcgtcgctaagcaaaacgatgaagttgcctcgagcattaaagaatggatgctgaaaggtgaactcgttccagatgaaattggtaatcctgtagtaaaacgccgcctgaaggagaaagattgcgaaaaaggctttattttggatggtttcccgcgtacccgccgtcaagcggaatatctggatagttttcttgaatcgcagggccgccagttgacagccgccgtgctgctggaggtccccgaagatgaagttgttgtgcgtctgctgtctcgccgtgtttgtccgaaatgcgggcgtagttttaacatgcagtttctgccgccaaaagaagacgagctgtgtgacgattgcggtgtcagtttagtacagcgtttcgatgataaggaagaaacggtccgtatgcgcctgaaagtctaccgtgagaagacccagccggtcattgactattatagtaagaaaggtattctcgcacgcgtagatgggagccaagaaatcatgcctatcgtggcagaagtcctggggattctgggttggagcgataag

SEQ ID NO: 3008 - protein, 231 aa, synthetic construct
  REGION 1..231: note = variant of adenylate kinase from Thermotoga neapolitana
MHHHHHHGGSGMGAYLVLLGPPGAGKGTQGRIISAKTGIPHISTGDILRQIVAKQNDEVASSIKEWMLKGELVPDEIGNPVVKRRLKEKDCEKGFILDGFPRTRRQAEYLDSFLESQGRQLTAAVLLEVPEDEVVVRLLSRRVCPKCGRSFNMQFLPPKEDELCDDCGVSLVQRFDDKEETVRMRLKVYREKTQPVIDYYSKKGILARVDGSQEIMPIVAEVLGILGWSDK

SEQ ID NO: 3009 - DNA, 693 bp, synthetic construct
  misc_feature 1..693: note = variant of adenylate kinase from Thermotoga neapolitana
  source 1..693: mol_type = other DNA
atgcaccatcatcaccatcacgggggctccggcatgggggcatatctggtgttattaggtccgccgggcgcgggaaaaggtacccaaggccgtattatttcggcaaaaactggcatcccgcatattagcacgggcgatatcctgcgtaacatcgtcgctaagcaaaacgatgaagttgcctcgagcattaaagaatggatgctgaaaggtgaactcgttccagatgaaattggtaatcctgtagtaaaacgccgcctgaaggagctggactgcgaagtgggctttattttggatggtttcccgcgtaccgcccgtcaagcggaatatctggatagttttcttgaatcgcagggccgccagttgacagccgccgtgctgctggaggtccccgaagatgaagttgttgtgcgtctgcggtctcgccgtgtttgtccgaaatgcgggcgtagttacaacatgatttttctgccaccaaaagaagacgagctgtgtgacgattgcggtgtcagcttagtgcagcgtttcgatgataaggaagaaacggtccgtatgcgcctgaaagtctaccgtgagaagacccagccggtcattgactattatagtaagaaaggtattctcgcacgcgtagatgggagccaagaaatcatgcctatcgtggcagaagtcctggggattctgggttggagcgataag

SEQ ID NO: 3010 - protein, 231 aa, synthetic construct
  REGION 1..231: note = variant of adenylate kinase from Thermotoga neapolitana
MHHHHHHGGSGMGAYLVLLGPPGAGKGTQGRIISAKTGIPHISTGDILRNIVAKQNDEVASSIKEWMLKGELVPDEIGNPVVKRRLKELDCEVGFILDGFPRTARQAEYLDSFLESQGRQLTAAVLLEVPEDEVVVRLRSRRVCPKCGRSYNMIFLPPKEDELCDDCGVSLVQRFDDKEETVRMRLKVYREKTQPVIDYYSKKGILARVDGSQEIMPIVAEVLGILGWSDK

SEQ ID NO: 3011 - DNA, 693 bp, synthetic construct
  misc_feature 1..693: note = variant of adenylate kinase from Thermotoga neapolitana
  source 1..693: mol_type = other DNA
atgcaccatcatcaccatcacgggggctccggcatgggggcatatctggtgttattaggtccgccgggcgcgggaaaaggtacccaaggccgtattatttcggcaagcactggcatcccgcatattagcacgggcgatatcctgcgtaacatcgtcgctaagcaaaacgatgaagttgcctcgagcattaaagaatggatgctgaaaggtgaactcgttccagatgaaattggtaatcctgtagtaaaacgccgcctgaaggagctggactgcgaaaaaggctttattttggatggtttcccgcgtaccgcccgtcaagcggaatatttagatagttttcttgaatcgcagggccgccagttgacagccgccgtgctgctggaggtccccgaagatgaagttgttgtgcgtctgcggtctcgccgtgtttgtccgaaatgcgggcgtagttacaacatgatttttctgccaccaaaagaagacgagctgtgtgacgattgcggtgtcggcttagtgcagcgtttcgatgataaggaagaaacggtccgtatgcgcctgaaagtctaccgtgagaagacccagccggtcattgactattatagtaagaaaggtattctcgcacgcgtagatgggagccaagaaatcatgcctatcgtggcagaagtcctggggattctgggttggagcgataag

SEQ ID NO: 3012 - protein, 231 aa, synthetic construct
  REGION 1..231: note = variant of adenylate kinase from Thermotoga neapolitana
MHHHHHHGGSGMGAYLVLLGPPGAGKGTQGRIISASTGIPHISTGDILRNIVAKQNDEVASSIKEWMLKGELVPDEIGNPVVKRRLKELDCEKGFILDGFPRTARQAEYLDSFLESQGRQLTAAVLLEVPEDEVVVRLRSRRVCPKCGRSYNMIFLPPKEDELCDDCGVGLVQRFDDKEETVRMRLKVYREKTQPVIDYYSKKGILARVDGSQEIMPIVAEVLGILGWSDK

SEQ ID NO: 3013 - DNA, 693 bp, synthetic construct
  misc_feature 1..693: note = variant of adenylate kinase from Thermotoga neapolitana
  source 1..693: mol_type = other DNA
atgcaccatcatcaccatcacgggggctccggcatgggggcatatctggtgttattaggtccgccgggcgcgggaaaaggtacccaaggccgtattatttcggcaagcactggcatcccgcatattagcacgggcgatatcctgcgtaacatcgtcgctaagcaaaacgatgaagttgcctcgagcattaaagaatggatgctgaaaggtgaactcgttccagatgaaattggtaatcctgtagtaaaacgccgcctgaaggagctggactgcgaaaaaggctttattttggatggtttcccgcgtaccgcccgtcaagcggaatatctggatagttttcttgaatcgcagggccgccagttgacagccgccgtgctgctggaggtccccgaagatgaagttgttgtgcgtctgctgtctcgccgtgtttgtccgaaatgcgggcgtagttacaacatgatttttctgccaccaaaagaagacgagctgtgtgacgattgcggtgtcagcttagcgcagcgtttcgatgataaggaagaaacggtccgtatgcgcctgaaagtctaccgtgagaagacccagccggtcattgactattatagtaagaaaggtattctcgcacgcgtagatgggagccaagaaatcatgcctatcgtggcagaagtcctggggattctgggttggagcgataag

SEQ ID NO: 3014 - protein, 231 aa, synthetic construct
  REGION 1..231: note = variant of adenylate kinase from Thermotoga neapolitana
MHHHHHHGGSGMGAYLVLLGPPGAGKGTQGRIISASTGIPHISTGDILRNIVAKQNDEVASSIKEWMLKGELVPDEIGNPVVKRRLKELDCEKGFILDGFPRTARQAEYLDSFLESQGRQLTAAVLLEVPEDEVVVRLLSRRVCPKCGRSYNMIFLPPKEDELCDDCGVSLAQRFDDKEETVRMRLKVYREKTQPVIDYYSKKGILARVDGSQEIMPIVAEVLGILGWSDK

SEQ ID NO: 3015 - DNA, 693 bp, synthetic construct
  misc_feature 1..693: note = variant of adenylate kinase from Thermotoga neapolitana
  source 1..693: mol_type = other DNA
atgcaccatcatcaccatcacgggggctccggcatgggggcatatctggtgttattaggtccgccgggcgcgggaaaaggtacccaaggccgtattatttcggcaaagactggcatcccgcatattagcacgggcgatatcctgcgtcagatcgtcgctaagcaaaacgatgaagttgcctcgagcattaaagaatggatgctgaaaggtgaactcgttccagatgaaattggtaatcctgtagtaaaacgccgcctgaaggagaaagattgcgaaaaaggctttattttggatggtttcccgcgtacccgccgtcaagcggaatatctggatagttttcttgaatcgcagggccgccagttgacagccgccgtgctgctggaggtccccgaagatgaagttgttgtgcgtctgctgtctcgccgtgtttgtccgaaatgcgggcgtagttttaacatgcagtttctggtgccaaaagaagacgagctgtgtgacgattgcggtgtcagtttagtacagcgtttcgatgataaggaagaaacggtccgtatgcgcctgaaagtctaccgtgagaagacccagccggtcattgactattatagtaagaaaggtattctcgcacgcgtagatgggagccaagaaatcatgcctatcgtggcagaagtcctggggattctgggttggagcgataag

SEQ ID NO: 3016 - protein, 231 aa, synthetic construct
  REGION 1..231: note = variant of adenylate kinase from Thermotoga neapolitana
MHHHHHHGGSGMGAYLVLLGPPGAGKGTQGRIISAKTGIPHISTGDILRQIVAKQNDEVASSIKEWMLKGELVPDEIGNPVVKRRLKEKDCEKGFILDGFPRTRRQAEYLDSFLESQGRQLTAAVLLEVPEDEVVVRLLSRRVCPKCGRSFNMQFLVPKEDELCDDCGVSLVQRFDDKEETVRMRLKVYREKTQPVIDYYSKKGILARVDGSQEIMPIVAEVLGILGWSDK

SEQ ID NO: 3017 - DNA, 693 bp, synthetic construct
  misc_feature 1..693: note = variant of adenylate kinase from Thermotoga neapolitana
  source 1..693: mol_type = other DNA
atgcaccatcatcaccatcacgggggctccggcatgggggcatatctggtgttattaggtccgccgggcgcgggaaaaggtacccaaggccgtattatttcggcaaagactggcatcccgcatattagcacgggcgatatcctgcgtcagatcgtcgctaagcaaaacgatgaagttgcctcgagcattaaagaatggatgctgaaaggtgaactcgttccagatgaaattggtaatcctgtagtaaaacgccgcctgaaggagaaagattgcgaaaaaggctttattttggatggtttcccgcgtaccgcccgtcaagcggaatatctggatagttttcttgaatcgcagggccgccagttgacagccgccgtgctgctggaggtccccgaagatgaagttgttgtgcgtctgctgtctcgccgtgtttgtccgaaatgcgggcgtagttttaacatgatttttctgccgccaaaagaagacgagctgtgtgacgattgcggtgtcagtttagtacagcgtttcgatgataaggaagaaacggtccgtatgcgcctgaaagtctaccgtgagaagacccagccggtcattgactattatagtaagaaaggtattctcgcacgcgtagatgggagccaagaaatcgaacctatcgtggcagaagtcctggggattctgggttggagcgataag

SEQ ID NO: 3018 - protein, 231 aa, synthetic construct
  REGION 1..231: note = variant of adenylate kinase from Thermotoga neapolitana
MHHHHHHGGSGMGAYLVLLGPPGAGKGTQGRIISAKTGIPHISTGDILRQIVAKQNDEVASSIKEWMLKGELVPDEIGNPVVKRRLKEKDCEKGFILDGFPRTARQAEYLDSFLESQGRQLTAAVLLEVPEDEVVVRLLSRRVCPKCGRSFNMIFLPPKEDELCDDCGVSLVQRFDDKEETVRMRLKVYREKTQPVIDYYSKKGILARVDGSQEIEPIVAEVLGILGWSDK

SEQ ID NO: 3019 - DNA, 693 bp, synthetic construct
  misc_feature 1..693: note = variant of adenylate kinase from Thermotoga neapolitana
  source 1..693: mol_type = other DNA
atgcaccatcatcaccatcacgggggctccggcatgggggcatatctggtgttattaggtccgccgggcgcgggaaaaggtacccaaggccgtattatttcggcaagcactggcatcccgcatattagcacgggcgatatcctgcgtcagatcgtcgctaagcaaaacgatgaagttgcctcgagcattaaagaatggatgctgaaaggtgaactcgttccagatgaaattggtaatcctgtagtaaaacgccgcctgaaggagctggactgcgaaaaaggctttattttggatggtttcccgcgtaccgcccgtcaagcggaatatctggatagttttcttgaatcgcagggccgccagttgacagccgccgtgctgctggaggtccccgaagatgaagttgttgtgcgtctgctgtctcgccgtgtttgtccgaaatgcgggcgtagttacaacatgatttttctgccaccaaaagaagacgagctgtgtgacgattgcggtgtcagcttagtgcagcgtttcgatgataaggaagaaacggtccgtatgcgcctgaaagtctaccgtgagaagacccagccggtcattgactattatagtaagaaaggtattctcgcacgcgtagatgggagccaagaaatcatgcctatcgtggcagaagtcctggggattctgggttggagcgataag

SEQ ID NO: 3020 - protein, 231 aa, synthetic construct
  REGION 1..231: note = variant of adenylate kinase from Thermotoga neapolitana
MHHHHHHGGSGMGAYLVLLGPPGAGKGTQGRIISASTGIPHISTGDILRQIVAKQNDEVASSIKEWMLKGELVPDEIGNPVVKRRLKELDCEKGFILDGFPRTARQAEYLDSFLESQGRQLTAAVLLEVPEDEVVVRLLSRRVCPKCGRSYNMIFLPPKEDELCDDCGVSLVQRFDDKEETVRMRLKVYREKTQPVIDYYSKKGILARVDGSQEIMPIVAEVLGILGWSDK

SEQ ID NO: 3021 - DNA, 693 bp, synthetic construct
  misc_feature 1..693: note = variant of adenylate kinase from Thermotoga neapolitana
  source 1..693: mol_type = other DNA
atgcaccatcatcaccatcacgggggctccggcatgggggcatatctggtgttattaggtccgccgggcgcgggaaaaggtacccaaggccgtattatttcggcaaaaactggcatcccgcatattagcacgggcgatatcctgcgtaacatcgtcgctaagcaaaacgatgaagttgcctcgagcattaaagaatggatgctgaaaggtgaactcgttccagatgaaattggtaatcctgtagtaaaacgccgcctgaaggagctggactgcgaagtgggctttattttggatggtttcccgcgtaccgcccgtcaagcggaatatctggatagttttcttgaatcgcagggccgccagttgacagccgccgtgctgctggaggtccccgaagatgaagttgttgtgcgtctgctgtctcgccgtgtttgtccgaaatgcgggcgtagttacaacatgatttttctgccaccaaaagaagacgagctgtgtgacgattgcggtgtcagtttagtacagcgtttcgatgataaggaagaaacggtccgtatgcgcctgaaagtctaccgtgagaagacccagccggtcattgactattatagtaagaaaggtattctcgcacgcgtagatgggagccaagaaatcatgcctatcgtggcagaagtcctggggattctgggttggagcgataag

SEQ ID NO: 3022 - protein, 231 aa, synthetic construct
  REGION 1..231: note = variant of adenylate kinase from Thermotoga neapolitana
MHHHHHHGGSGMGAYLVLLGPPGAGKGTQGRIISAKTGIPHISTGDILRNIVAKQNDEVASSIKEWMLKGELVPDEIGNPVVKRRLKELDCEVGFILDGFPRTARQAEYLDSFLESQGRQLTAAVLLEVPEDEVVVRLLSRRVCPKCGRSYNMIFLPPKEDELCDDCGVSLVQRFDDKEETVRMRLKVYREKTQPVIDYYSKKGILARVDGSQEIMPIVAEVLGILGWSDK

SEQ ID NO: 3023 - DNA, 693 bp, synthetic construct
  misc_feature 1..693: note = variant of adenylate kinase from Thermotoga neapolitana
  source 1..693: mol_type = other DNA
atgcaccatcatcaccatcacgggggctccggcatgggggcatatctggtgttattaggtccgccgggcgcgggaaaaggtacccaaggccgtattatttcggcaaagactggcatcccgcatattagcacgggcgatatcctgcgtaacatcgtcgctaagcaaaacgatgaagttgcctcgagcattaaagaatggatgctgaaaggtgaactcgttccagatgaaattggtaatcctgtagtaaaacgccgcctgaaggagaaagactgcgaaaaaggctttattttggatggtttcccgcgtaccgcccgtcaagcggaatatctggatagttttcttgaatcgcagggccgccagttgacagccgccgtgctgctggaggtccccgaagatgaagttgttgtgcgtctgctgtctcgccgtgtttgtccgaaatgcgggcgtagttacaacatgatttttctgccaccaaaagaagacgagctgtgtgacgattgcggtgtcggcttagtgcagcgtttcgatgataaggaagaaacggtccgtatgcgcctgaaagtctaccgtgagaagacccagccggtcattgactattatagtaagaaaggtattctcgcacgcgtagatgggagccaagaaatcatgcctatcgtggcagaagtcctggggattctgggttggagcgataag

SEQ ID NO: 3024 - protein, 231 aa, synthetic construct
  REGION 1..231: note = variant of adenylate kinase from Thermotoga neapolitana
MHHHHHHGGSGMGAYLVLLGPPGAGKGTQGRIISAKTGIPHISTGDILRNIVAKQNDEVASSIKEWMLKGELVPDEIGNPVVKRRLKEKDCEKGFILDGFPRTARQAEYLDSFLESQGRQLTAAVLLEVPEDEVVVRLLSRRVCPKCGRSYNMIFLPPKEDELCDDCGVGLVQRFDDKEETVRMRLKVYREKTQPVIDYYSKKGILARVDGSQEIMPIVAEVLGILGWSDK

SEQ ID NO: 3025 - DNA, 693 bp, synthetic construct
  misc_feature 1..693: note = variant of adenylate kinase from Thermotoga neapolitana
  source 1..693: mol_type = other DNA
atgcaccatcatcaccatcacgggggctccggcatgggggcatatctggtgttattaggtccgccgggcgcgggaaaaggtacccaaggccgtattatttcggcaaagactggcatcccgcatattagcacgggcgatatcctgcgtcagatcgtcgctaagcaaaacgatgaagttgcctcgagcattaaagaatggatgctgaaaggtgaactcgttccagatgaaattggtaatcctgtagtaaaacgccgcctgaaggagaaagattgcgaaaaaggctttattttggatggtttcccgcgtacccgccgtcaagcggaatatctggatagttttcttgaatcgcagggccgccagttgacagccgccgtgctgctggaggtccccgaagatgaagttgttgtgcgtctgctgtctcgccgtgtttgtccgaaatgcgggcgtagttataacatgcagtttctggtgccaaaagaagacgagctgtgtgacgattgcggtgtcagtttagtacagcgtttcgatgataaggaagaaacggtccgtatgcgcctgaaagtctaccgtgagaagacccagccggtcattgactattatagtaagaaaggtattctcgcacgcgtagatgggagccaagaaatcgaacctatcgtggcagaagtcctggggattctgggttggagcgataag

SEQ ID NO: 3026 - protein, 231 aa, synthetic construct
  REGION 1..231: note = variant of adenylate kinase from Thermotoga neapolitana
MHHHHHHGGSGMGAYLVLLGPPGAGKGTQGRIISAKTGIPHISTGDILRQIVAKQNDEVASSIKEWMLKGELVPDEIGNPVVKRRLKEKDCEKGFILDGFPRTRRQAEYLDSFLESQGRQLTAAVLLEVPEDEVVVRLLSRRVCPKCGRSYNMQFLVPKEDELCDDCGVSLVQRFDDKEETVRMRLKVYREKTQPVIDYYSKKGILARVDGSQEIEPIVAEVLGILGWSDK

SEQ ID NO: 3027 - DNA, 693 bp, synthetic construct
  misc_feature 1..693: note = variant of adenylate kinase from Thermotoga neapolitana
  source 1..693: mol_type = other DNA
atgcaccatcatcaccatcacgggggctccggcatgggggcatatctggtgttattaggtccgccgggcgcgggaaaaggtacccaaggccgtattatttcggcaagcactggcatcccgcatattagcacgggcgatatcctgcgtcagatcgtcgctaagcaaaacgatgaagttgcctcgagcattaaagaatggatgctgaaaggtgaactcgttccagatgaaattggtaatcctgtagtaaaacgccgcctgaaggagaaagactgcgaaaaaggctttattttggatggtttcccgcgtaccgcccgtcaagcggaatatctggatagttttcttgaatcgcagggccgccagttgacagccgccgtgctgctggaggtccccgaagatgaagttgttgtgcgtctgctgtctcgccgtgtttgtccgaaatgcgggcgtagttacaacatgatttttctgccaccaaaagaagacgagctgtgtgacgattgcggtgtcggcttagtgcagcgtttcgatgataaggaagaaacggtccgtatgcgcctgaaagtctaccgtgagaagacccagccggtcattgactattatagtaagaaaggtattctcgcacgcgtagatgggagccaagaaatcatgcctatcgtggcagaagtcctggggattctgggttggagcgataag

SEQ ID NO: 3028 - protein, 231 aa, synthetic construct
  REGION 1..231: note = variant of adenylate kinase from Thermotoga neapolitana
MHHHHHHGGSGMGAYLVLLGPPGAGKGTQGRIISASTGIPHISTGDILRQIVAKQNDEVASSIKEWMLKGELVPDEIGNPVVKRRLKEKDCEKGFILDGFPRTARQAEYLDSFLESQGRQLTAAVLLEVPEDEVVVRLLSRRVCPKCGRSYNMIFLPPKEDELCDDCGVGLVQRFDDKEETVRMRLKVYREKTQPVIDYYSKKGILARVDGSQEIMPIVAEVLGILGWSDK

SEQ ID NO: 3029 - DNA, 693 bp, synthetic construct
  misc_feature 1..693: note = variant of adenylate kinase from Thermotoga neapolitana
  source 1..693: mol_type = other DNA
atgcaccatcatcaccatcacgggggctccggcatgggggcatatctggtgttattaggtccgccgggcgcgggaaaaggtacccaaggccgtattatttcggcaaagactggcatcccgcatattagcacgggcgatatcctgcgtcagatcgtcgctaagcaaaacgatgaagttgcctcgagcattaaagaatggatgctgaaaggtgaactcgttccagatgaaattggtaatcctgtagtaaaacgccgcctgaaggagaaaagctgcgaaaaaggctttattttggatggtttcccgcgtaccgcccgtcaagcggaatatctggatagttttcttgaatcgcagggccgccagttgacagccgccgtgctgctggaggtccccgaagatgaagttgttgtgcgtctgctgtctcgccgtgtttgtccgaaatgcgggcgtagttttaacatgatttttctggtgccaaaagaagacgagctgtgtgacgattgcggtgtcagtttagtacagcgtttcgatgataaggaagaaacggtccgtatgcgcctgaaagtctaccgtgagaagacccagccggtcattgactattatagtaagaaaggtattctcgcacgcgtagatgggagccaagaaatcatgcctatcgtggcagaagtcctggggattctgggttggagcgataag

SEQ ID NO: 3030 - protein, 231 aa, synthetic construct
  REGION 1..231: note = variant of adenylate kinase from Thermotoga neapolitana
MHHHHHHGGSGMGAYLVLLGPPGAGKGTQGRIISAKTGIPHISTGDILRQIVAKQNDEVASSIKEWMLKGELVPDEIGNPVVKRRLKEKSCEKGFILDGFPRTARQAEYLDSFLESQGRQLTAAVLLEVPEDEVVVRLLSRRVCPKCGRSFNMIFLVPKEDELCDDCGVSLVQRFDDKEETVRMRLKVYREKTQPVIDYYSKKGILARVDGSQEIMPIVAEVLGILGWSDK

SEQ ID NO: 3031 - DNA, 693 bp, synthetic construct
  misc_feature 1..693: note = variant of adenylate kinase from Thermotoga neapolitana
  source 1..693: mol_type = other DNA
atgcaccatcatcaccatcacgggggctccggcatgggggcatatctggtgttattaggtccgccgggcgcgggaaaaggtacccaaggccgtattatttcggcaaagactggcatcccgcatattagcacgggcgatatcctgcgtcagatcgtcgctaagcaaaacgatgaagttgcctcgagcattaaagaatggatgctgaaaggtgaactcgttccagatgaaattggtaatcctgtagtaaaacgccgcctgaaggagctggactgcgaaaaaggctttattttggatggtttcccgcgtaccgcccgtcaagcggaatatctggatagttttcttgaatcgcagggccgccagttgacagccgccgtgctgctggaggtccccgaagatgaagttgttgtgcgtctgctgtctcgccgtgtttgtccgaaatgcgggcgtagttacaacatgatttttctgccaccaaaagaagacgagctgtgtgacgattgcggtgtcggcttagcgcagcgtttcgatgataaggaagaaacggtccgtatgcgcctgaaagtctaccgtgagaagacccagccggtcattgactattatagtaagaaaggtattctcgcacgcgtagatgggagccaagaaatcatgcctatcgtggcagaagtcctggggattctgggttggagcgataag

SEQ ID NO: 3032 - protein, 231 aa, synthetic construct
  REGION 1..231: note = variant of adenylate kinase from Thermotoga neapolitana
MHHHHHHGGSGMGAYLVLLGPPGAGKGTQGRIISAKTGIPHISTGDILRQIVAKQNDEVASSIKEWMLKGELVPDEIGNPVVKRRLKELDCEKGFILDGFPRTARQAEYLDSFLESQGRQLTAAVLLEVPEDEVVVRLLSRRVCPKCGRSYNMIFLPPKEDELCDDCGVGLAQRFDDKEETVRMRLKVYREKTQPVIDYYSKKGILARVDGSQEIMPIVAEVLGILGWSDK

SEQ ID NO: 3033 - DNA, 693 bp, synthetic construct
  misc_feature 1..693: note = variant of adenylate kinase from Thermotoga neapolitana
  source 1..693: mol_type = other DNA
atgcaccatcatcaccatcacgggggctccggcatgggggcatatctggtgttattaggtccgccgggcgcgggaaaaggtacccaaggccgtattatttcggcaaagactggcatcccgcatattagcacgggcgatatcctgcgtcagatcgtcgctaagcaaaacgatgaagttgcctcgagcattaaagaatggatgctgaaaggtgaactcgttccagatgaaattggtaatcctgtagtaaaacgccgcctgaaggagaaagattgcgaaaaaggctttattttggatggtttcccgcgtaccgcgcgtcaagcggaatatctggatagttttcttgaatcgcagggccgccagttgacagccgccgtgctgctggaggtccccgaagatgaagttgttgtgcgtctgctgtctcgccgtgtttgtccgaaatgcgggcgtagttttaacatgatttttctggtgccaaaagaagacgagctgtgtgacgattgcggtgtcagtttagtacagcgtttcgatgataaggaagaaacggtccgtatgcgcctgaaagtctaccgtgagaagacccagccggtcattgactattatagtaagaaaggtattctcgcacgcgtagatgggagccaagaaatcatgcctatcgtggcagaagtcctggggattcggggttggagcgataag

SEQ ID NO: 3034 - protein, 231 aa, synthetic construct
  REGION 1..231: note = variant of adenylate kinase from Thermotoga neapolitana
MHHHHHHGGSGMGAYLVLLGPPGAGKGTQGRIISAKTGIPHISTGDILRQIVAKQNDEVASSIKEWMLKGELVPDEIGNPVVKRRLKEKDCEKGFILDGFPRTARQAEYLDSFLESQGRQLTAAVLLEVPEDEVVVRLLSRRVCPKCGRSFNMIFLVPKEDELCDDCGVSLVQRFDDKEETVRMRLKVYREKTQPVIDYYSKKGILARVDGSQEIMPIVAEVLGIRGWSDK

SEQ ID NO: 3035 - DNA, 693 bp, synthetic construct
  misc_feature 1..693: note = variant of adenylate kinase from Thermotoga neapolitana
  source 1..693: mol_type = other DNA
atgcaccatcatcaccatcacgggggctccggcatgggggcatatctggtgttattaggtccgccgggcgcgggaaaaggtacccaaggccgtattatttcggcaaagactggcatcccgcatattagcacgggcgatatcctgcgtcagatcgtcgctaagcaaaacgatgaagttgcctcgagcattaaagaatggatgctgaaaggtgaactcgttccagatgaaattggtaattgggtagtaaaacgccgcctgaaggagaaagattgcgaaaaaggctttattttggatggtttcccgcgtaccgcgcgtcaagcggaatatctggatagttttcttgaatcgcagggccgccagttgacagccgccgtgctgctggaggtccccgaagatgaagttgttgtgcgtctgctgtctcgccgtgtttgtccgaaatgcgggcgtagttttaacatgatttttctggtgccaaaagaagacgagctgtgtgacgattgcggtgtcagtttagtacagcgtttcgatgataaggaagaaacggtccgtatgcgcctgaaagtctaccgtgagaagacccagccggtcattgactattatagtaagaaaggtattctcgcacgcgtagatgggagccaagaaatcatgcctatcgtggcagaagtcctggggattctgggttggagcgataag

SEQ ID NO: 3036 - protein, 231 aa, synthetic construct
  REGION 1..231: note = variant of adenylate kinase from Thermotoga neapolitana
MHHHHHHGGSGMGAYLVLLGPPGAGKGTQGRIISAKTGIPHISTGDILRQIVAKQNDEVASSIKEWMLKGELVPDEIGNWVVKRRLKEKDCEKGFILDGFPRTARQAEYLDSFLESQGRQLTAAVLLEVPEDEVVVRLLSRRVCPKCGRSFNMIFLVPKEDELCDDCGVSLVQRFDDKEETVRMRLKVYREKTQPVIDYYSKKGILARVDGSQEIMPIVAEVLGILGWSDK

SEQ ID NO: 3037 - DNA, 693 bp, synthetic construct
  misc_feature 1..693: note = variant of adenylate kinase from Thermotoga neapolitana
  source 1..693: mol_type = other DNA
atgcaccatcatcaccatcacgggggctccggcatgggggcatatctggtgttattaggtccgccgggcgcgggaaaaggtacccaaggccgtattatttcggcaaagactggcatcccgcatattagcacgggcgatatcctgcgtcagatcgtcgctaagcaaaacgatgaagttgcctcgagcattaaagaatggatgctgaaaggtgaactcgttccagatgaaattggtaatcctgtagtaaaacgccgcctgaaggagaaagattgcgaaaaaggctttattttggatggtttcccgcgtaccgcgcgtcaagcggaatatctggatagttttcttgaatcgcagggccgccagttgacagccgccgtgctgctggaggtccccgaagatgaagttgttgtgcgtctgctgtctcgccgtgtttgtccgaaatgcgggcgtagttttaacatgatttttctggtgccaaaagaagacgagctgtgtgacgattgcggtgtcagtttagtacagcgtttcgatgataaggaagaaacggtccgtatgcgcctgaaagtctaccgtgagaagacccagccggtcattgactattatagtaagaaaggtattctcgcacgcgtagatgggagccaagaaatcatgacgatcgtggcagaagtcctggggattctgggttggagcgataag

SEQ ID NO: 3038 - protein, 231 aa, synthetic construct
  REGION 1..231: note = variant of adenylate kinase from Thermotoga neapolitana
MHHHHHHGGSGMGAYLVLLGPPGAGKGTQGRIISAKTGIPHISTGDILRQIVAKQNDEVASSIKEWMLKGELVPDEIGNPVVKRRLKEKDCEKGFILDGFPRTARQAEYLDSFLESQGRQLTAAVLLEVPEDEVVVRLLSRRVCPKCGRSFNMIFLVPKEDELCDDCGVSLVQRFDDKEETVRMRLKVYREKTQPVIDYYSKKGILARVDGSQEIMTIVAEVLGILGWSDK

SEQ ID NO: 3039 - DNA, 693 bp, synthetic construct
  misc_feature 1..693: note = variant of adenylate kinase from Thermotoga neapolitana
  source 1..693: mol_type = other DNA
atgcaccatcatcaccatcacgggggctccggcatgggggcatatctggtgttattaggtccgccgggcgcgggaaaaggtacccaaggccgtattatttcggcaaagactggcatcccgcatattagcacgggcgatatcctgcgtcagatcgtcgctaagcaaaacgatgaagttgcctcgagcattaaagaatggatgctgaaaggtgaactcgttccagatgaaattggtaatcctgtagtaaaacgccgcctgaaggagaaagattgcgaaaaaggctttattttggatggtttcccgcgtaccgcgcgtcaagcggaatatctggatagttttcttgaatcgcagggccgccagttgacagccgccgtgctgctggaggtccccgaagatgaagttgttgtgcgtctgctgtctcgccgtgtttgtccgaaatgcgggcgtagttttaacatgatttttctggtgccaaaagaagacgagctgtgtgacgattgcggtgtcccgttagtacagcgtttcgatgataaggaagaaacggtccgtatgcgcctgaaagtctaccgtgagaagacccagccggtcattgactattatagtaagaaaggtattctcgcacgcgtagatgggagccaagaaatcatgcctatcgtggcagaagtcctggggattctgggttggagcgataag

SEQ ID NO: 3040 - protein, 231 aa, synthetic construct
  REGION 1..231: note = variant of adenylate kinase from Thermotoga neapolitana
MHHHHHHGGSGMGAYLVLLGPPGAGKGTQGRIISAKTGIPHISTGDILRQIVAKQNDEVASSIKEWMLKGELVPDEIGNPVVKRRLKEKDCEKGFILDGFPRTARQAEYLDSFLESQGRQLTAAVLLEVPEDEVVVRLLSRRVCPKCGRSFNMIFLVPKEDELCDDCGVPLVQRFDDKEETVRMRLKVYREKTQPVIDYYSKKGILARVDGSQEIMPIVAEVLGILGWSDK

SEQ ID NO: 3041 - DNA, 693 bp, synthetic construct
  misc_feature 1..693: note = variant of adenylate kinase from Thermotoga neapolitana
  source 1..693: mol_type = other DNA
atgcaccatcatcaccatcacgggggctccggcatgggggcatatctggtgttattaggtccgccgggcgcgggaaaaggtacccaaggccgtattatttcggcaaagactggcatcccgcatattagcacgggcgatatcctgcgtcagatcgtcgctaagcaaaacgatgaagttgcctcgagcattaaagaatggatgctgaaaggtgaactcgttccagatgaaattggtccgcctgtagtaaaacgccgcctgaaggagaaagattgcgaaaaaggctttattttggatggtttcccgcgtaccgcgcgtcaagcggaatatctggatagttttcttgaatcgcagggccgccagttgacagccgccgtgctgctggaggtccccgaagatgaagttgttgtgcgtctgctgtctcgccgtgtttgtccgaaatgcgggcgtagttttaacatgatttttctggtgccaaaagaagacgagctgtgtgacgattgcggtgtcagtttagtacagcgtttcgatgataaggaagaaacggtccgtatgcgcctgaaagtctaccgtgagaagacccagccggtcattgactattatagtaagaaaggtattctcgcacgcgtagatgggagccaagaaatcatgcctatcgtggcagaagtcctggggattctgggttggagcgataag

SEQ ID NO: 3042 - protein, 231 aa, synthetic construct
  REGION 1..231: note = variant of adenylate kinase from Thermotoga neapolitana
MHHHHHHGGSGMGAYLVLLGPPGAGKGTQGRIISAKTGIPHISTGDILRQIVAKQNDEVASSIKEWMLKGELVPDEIGPPVVKRRLKEKDCEKGFILDGFPRTARQAEYLDSFLESQGRQLTAAVLLEVPEDEVVVRLLSRRVCPKCGRSFNMIFLVPKEDELCDDCGVSLVQRFDDKEETVRMRLKVYREKTQPVIDYYSKKGILARVDGSQEIMPIVAEVLGILGWSDK

SEQ ID NO: 3043 - DNA, 693 bp, synthetic construct
  misc_feature 1..693: note = variant of adenylate kinase from Thermotoga neapolitana
  source 1..693: mol_type = other DNA
atgcaccatcatcaccatcacgggggctccggcatgggggcatatctggtgttattaggtccgccgggcgcgggaaaaggtacccaaggccgtattatttcggcaaagactggcatcccgcatattagcacgggcgatatcctgcgtcagatcgtcgctaagcaaaacgatgaagttgcctcgagcattaaagaatggatgctgaaaggtgaactcgttccagatgaaattggtaagcctgtagtaaaacgccgcctgaaggagaaagattgcgaaaaaggctttattttggatggtttcccgcgtaccgcgcgtcaagcggaatatctggatagttttcttgaatcgcagggccgccagttgacagccgccgtgctgctggaggtccccgaagatgaagttgttgtgcgtctgctgtctcgccgtgtttgtccgaaatgcgggcgtagttttaacatgatttttctggtgccaaaagaagacgagctgtgtgacgattgcggtgtcagtttagtacagcgtttcgatgataaggaagaaacggtccgtatgcgcctgaaagtctaccgtgagaagacccagccggtcattgactattatagtaagaaaggtattctcgcacgcgtagatgggagccaagaaatcatgcctatcgtggcagaagtcctggggattctgggttggagcgataag

SEQ ID NO: 3044 - protein, 231 aa, synthetic construct
  REGION 1..231: note = variant of adenylate kinase from Thermotoga neapolitana
MHHHHHHGGSGMGAYLVLLGPPGAGKGTQGRIISAKTGIPHISTGDILRQIVAKQNDEVASSIKEWMLKGELVPDEIGKPVVKRRLKEKDCEKGFILDGFPRTARQAEYLDSFLESQGRQLTAAVLLEVPEDEVVVRLLSRRVCPKCGRSFNMIFLVPKEDELCDDCGVSLVQRFDDKEETVRMRLKVYREKTQPVIDYYSKKGILARVDGSQEIMPIVAEVLGILGWSDK

SEQ ID NO: 3045 - DNA, 693 bp, synthetic construct
  misc_feature 1..693: note = variant of adenylate kinase from Thermotoga neapolitana
  source 1..693: mol_type = other DNA
atgcaccatcatcaccatcacgggggctccggcatgggggcatatctggtgttattaggtccgccgggcgcgggaaaaggtacccaaggccgtattatttcggcaaagactggcatcccgcatattagcacgggcgatatcctgcgtcagatcgtcgctaagcaaaacgatgaagttgcctcgagcattaaagaatggatgctgaaaggtgaactcgttccagatgaaattggtaatcctgtagtaaaacgccgcctgaaggagaaagattgcgaaaaaggctttattttggatggtttcccgcgtaccgcgcgtcaagcggaatatctggatagttttcttgaatcgcagggccgccagttgacagccgccgtgctgctggaggtccccgaagatgaagttgttgtgcgtctgctgtctcgccgtgtttgtccgaaatgcgggcgtagttttaacatgatttttctggtgccaaaagaagacgagctgtgtgacgattgcggtgtccggttagtacagcgtttcgatgataaggaagaaacggtccgtatgcgcctgaaagtctaccgtgagaagacccagccggtcattgactattatagtaagaaaggtattctcgcacgcgtagatgggagccaagaaatcatgcctatcgtggcagaagtcctggggattctgggttggagcgataag

SEQ ID NO: 3046 - protein, 231 aa, synthetic construct
  REGION 1..231: note = variant of adenylate kinase from Thermotoga neapolitana
MHHHHHHGGSGMGAYLVLLGPPGAGKGTQGRIISAKTGIPHISTGDILRQIVAKQNDEVASSIKEWMLKGELVPDEIGNPVVKRRLKEKDCEKGFILDGFPRTARQAEYLDSFLESQGRQLTAAVLLEVPEDEVVVRLLSRRVCPKCGRSFNMIFLVPKEDELCDDCGVRLVQRFDDKEETVRMRLKVYREKTQPVIDYYSKKGILARVDGSQEIMPIVAEVLGILGWSDK

SEQ ID NO: 3047 - DNA, 693 bp, synthetic construct
  misc_feature 1..693: note = variant of adenylate kinase from Thermotoga neapolitana
  source 1..693: mol_type = other DNA
atgcaccatcatcaccatcacgggggctccggcatgggggcatatctggtgttattaggtccgccgggcgcgggaaaaggtacccaaggccgtattatttcggcaaagactggcatcccgcatattagcacgggcgatatcctgcgtcagatcgtcgctaagcaaaacgatgaagttgcctcgagcattaaagaatggatgctgaaaggtgaactcgttccagatgaaattggtaatcctgtagtaaaacgccgcctgaaggagaaagattgcgaaaaaggctttattttggatggtttcccgcgtaccgcgcgtcaagcggaatatctggatagttttcttgaatcgcagggccgccagttgacagccgccgtgctgctggaggtccccgaagatgaagttgttgtgcgtctgctgtctcgccgtgtttgtccgaaatgcgggcgtagttttaacatgatttttctggtgccaaaagaagacgagctgtgtgacgattgcggtgtcagtttagtacagcgtttcgatgataaggaagaaacggtccgtatgcgcctgaaagtctaccgtgagaagacccagccggtcattgactattatagtaagaaaggtattctcgcacgcgtagatgggagccaagaaatcatgcctatcgtggcagaagtcctgtctattctgggttggagcgataag

SEQ ID NO: 3048 - protein, 231 aa, synthetic construct
  REGION 1..231: note = variant of adenylate kinase from Thermotoga neapolitana
MHHHHHHGGSGMGAYLVLLGPPGAGKGTQGRIISAKTGIPHISTGDILRQIVAKQNDEVASSIKEWMLKGELVPDEIGNPVVKRRLKEKDCEKGFILDGFPRTARQAEYLDSFLESQGRQLTAAVLLEVPEDEVVVRLLSRRVCPKCGRSFNMIFLVPKEDELCDDCGVSLVQRFDDKEETVRMRLKVYREKTQPVIDYYSKKGILARVDGSQEIMPIVAEVLSILGWSDK

SEQ ID NO: 3049 - DNA, 693 bp, synthetic construct
  misc_feature 1..693: note = variant of adenylate kinase from Thermotoga neapolitana
  source 1..693: mol_type = other DNA
atgcaccatcatcaccatcacgggggctccggcatgggggcatatctggtgttattaggtccgccgggcgcgggaaaaggtacccaaggccgtattatttcggcaaagactggcatcccgcatattagcacgggcgatatcctgcgtcagatcgtcgctaagcaaaacgatgaagttgcctcgagcattaaagaatggatgctgaaaggtgaactcgttccagatgaaattggtaatcctgtagtaaaacgccgcctgaaggagaaagattgcgaaaaaggctttattttggatggtttcccgcgtaccgcgcgtcaagcggaatatctggatagttttcttgaatcgcagggccgccagttgacagccgccgtgctgctggaggtccccgaagatgaagttgttgtgcgtctgctgtctcgccgtgtttgtccgaaatgcgggcgtagttttaacatgatttttctggtgccaaaagaagacgagctgtgtgacgattgcggtgtcagtttagtacagcgtttcgatgataaggaagaaacggtccgtatgcgcctgaaagtctaccgtgagaagacccagccggtcattgactattatagtaagaaaggtattctcgcacgcgtagatgggagccaagaaatcatgcctatcgtggcagaagtcctgactattctgggttggagcgataag

SEQ ID NO: 3050 - protein, 231 aa, synthetic construct
  REGION 1..231: note = variant of adenylate kinase from Thermotoga neapolitana
MHHHHHHGGSGMGAYLVLLGPPGAGKGTQGRIISAKTGIPHISTGDILRQIVAKQNDEVASSIKEWMLKGELVPDEIGNPVVKRRLKEKDCEKGFILDGFPRTARQAEYLDSFLESQGRQLTAAVLLEVPEDEVVVRLLSRRVCPKCGRSFNMIFLVPKEDELCDDCGVSLVQRFDDKEETVRMRLKVYREKTQPVIDYYSKKGILARVDGSQEIMPIVAEVLTILGWSDK

SEQ ID NO: 3051 - DNA, 693 bp, synthetic construct
  misc_feature 1..693: note = variant of adenylate kinase from Thermotoga neapolitana
  source 1..693: mol_type = other DNA
atgcaccatcatcaccatcacgggggctccggcatgggggcatatctggtgttattaggtccgccgggcgcgggaaaaggtacccaaggccgtattatttcggcaaagactggcatcccgcatattagcacgggcgatatcctgcgtcagatcgtcgctaagcaaaacgatgaagttgcctcgagcattaaagaatggatgctgaaaggtgaactcgttccagatggtattggtaatcctgtagtaaaacgccgcctgaaggagaaagattgcgaaaaaggctttattttggatggtttcccgcgtaccgcgcgtcaagcggaatatctggatagttttcttgaatcgcagggccgccagttgacagccgccgtgctgctggaggtccccgaagatgaagttgttgtgcgtctgctgtctcgccgtgtttgtccgaaatgcgggcgtagttttaacatgatttttctggtgccaaaagaagacgagctgtgtgacgattgcggtgtcagtttagtacagcgtttcgatgataaggaagaaacggtccgtatgcgcctgaaagtctaccgtgagaagacccagccggtcattgactattatagtaagaaaggtattctcgcacgcgtagatgggagccaagaaatcatgcctatcgtggcagaagtcctggggattctgggttggagcgataag

SEQ ID NO: 3052 - protein, 231 aa, synthetic construct
  REGION 1..231: note = variant of adenylate kinase from Thermotoga neapolitana
MHHHHHHGGSGMGAYLVLLGPPGAGKGTQGRIISAKTGIPHISTGDILRQIVAKQNDEVASSIKEWMLKGELVPDGIGNPVVKRRLKEKDCEKGFILDGFPRTARQAEYLDSFLESQGRQLTAAVLLEVPEDEVVVRLLSRRVCPKCGRSFNMIFLVPKEDELCDDCGVSLVQRFDDKEETVRMRLKVYREKTQPVIDYYSKKGILARVDGSQEIMPIVAEVLGILGWSDK

SEQ ID NO: 3053 - DNA, 693 bp, synthetic construct
  misc_feature 1..693: note = variant of adenylate kinase from Thermotoga neapolitana
  source 1..693: mol_type = other DNA
atgcaccatcatcaccatcacgggggctccggcatgggggcatatctggtgttattaggtccgccgggcgcgggaaaaggtacccaaggccgtattatttcggcaaagactggcatcccgcatattagcacgggcgatatcctgcgtcagatcgtcgctaagcaaaacgatgaagttgcctcgagcattaaagaatggatgctgaaaggtgaactcgttccagatgaaattggtgcgcctgtagtaaaacgccgcctgaaggagaaagattgcgaaaaaggctttattttggatggtttcccgcgtaccgcgcgtcaagcggaatatctggatagttttcttgaatcgcagggccgccagttgacagccgccgtgctgctggaggtccccgaagatgaagttgttgtgcgtctgctgtctcgccgtgtttgtccgaaatgcgggcgtagttttaacatgatttttctggtgccaaaagaagacgagctgtgtgacgattgcggtgtcagtttagtacagcgtttcgatgataaggaagaaacggtccgtatgcgcctgaaagtctaccgtgagaagacccagccggtcattgactattatagtaagaaaggtattctcgcacgcgtagatgggagccaagaaatcatgcctatcgtggcagaagtcctggggattctgggttggagcgataag

SEQ ID NO: 3054 - protein, 231 aa, synthetic construct
  REGION 1..231: note = variant of adenylate kinase from Thermotoga neapolitana
MHHHHHHGGSGMGAYLVLLGPPGAGKGTQGRIISAKTGIPHISTGDILRQIVAKQNDEVASSIKEWMLKGELVPDEIGAPVVKRRLKEKDCEKGFILDGFPRTARQAEYLDSFLESQGRQLTAAVLLEVPEDEVVVRLLSRRVCPKCGRSFNMIFLVPKEDELCDDCGVSLVQRFDDKEETVRMRLKVYREKTQPVIDYYSKKGILARVDGSQEIMPIVAEVLGILGWSDK

SEQ ID NO: 3055 - DNA, 693 bp, synthetic construct
  misc_feature 1..693: note = variant of adenylate kinase from Thermotoga neapolitana
  source 1..693: mol_type = other DNA
atgcaccatcatcaccatcacgggggctccggcatgggggcatatctggtgttattaggtccgccgggcgcgggaaaaggtacccaaggccgtattatttcggcaaagactggcatcccgcatattagcacgggcgatatcctgcgtcagatcgtcgctaagcaaaacgatgaagttgcctcgagcattaaagaatggatgctgaaaggtgaactcgttccagatgaaattggtaatcctgtagtaaaacgccgcctgaaggagaaagattgcgaaaaaggctttattttggatggtttcccgcgtaccgcgcgtcaagcggaatatctggattgttttcttgaatcgcagggccgccagttgacagccgccgtgctgctggaggtccccgaagatgaagttgttgtgcgtctgctgtctcgccgtgtttgtccgaaatgcgggcgtagttttaacatgatttttctggtgccaaaagaagacgagctgtgtgacgattgcggtgtcagtttagtacagcgtttcgatgataaggaagaaacggtccgtatgcgcctgaaagtctaccgtgagaagacccagccggtcattgactattatagtaagaaaggtattctcgcacgcgtagatgggagccaagaaatcatgcctatcgtggcagaagtcctggggattctgggttggagcgataag

SEQ ID NO: 3056 - protein, 231 aa, synthetic construct
  REGION 1..231: note = variant of adenylate kinase from Thermotoga neapolitana
MHHHHHHGGSGMGAYLVLLGPPGAGKGTQGRIISAKTGIPHISTGDILRQIVAKQNDEVASSIKEWMLKGELVPDEIGNPVVKRRLKEKDCEKGFILDGFPRTARQAEYLDCFLESQGRQLTAAVLLEVPEDEVVVRLLSRRVCPKCGRSFNMIFLVPKEDELCDDCGVSLVQRFDDKEETVRMRLKVYREKTQPVIDYYSKKGILARVDGSQEIMPIVAEVLGILGWSDK

SEQ ID NO: 3057 - DNA, 693 bp, synthetic construct
  misc_feature 1..693: note = variant of adenylate kinase from Thermotoga neapolitana
  source 1..693: mol_type = other DNA
atgcaccatcatcaccatcacgggggctccggcatgggggcatatctggtgttattaggtccgccgggcgcgggaaaaggtacccaaggccgtattatttcggcaaagactggcatcccgcatattagcacgggcgatatcctgcgtcagatcgtcgctaagcaaaacgatgaagttgcctcgagcattaaagaatggatgctgaaaggtgaactcgttccagatgaaattggtaatcctgtagtaaaacgccgcctgaaggagaaagattgcgaaaaaggctttattttggatggtttcccgcgtaccgcgcgtcaagcggaatatctggatagttttcttgaatcgcagggccgccagttgacagccgccgtgctgctggaggtccccgaagatgaagttgttgtgcgtctgctgtctcgccgtgtttgtccgaaatgcgggcgtagttttaacatgatttttctggtgccaaaagaagacgagctgtgtgacgattgcggtgtcagtttaatgcagcgtttcgatgataaggaagaaacggtccgtatgcgcctgaaagtctaccgtgagaagacccagccggtcattgactattatagtaagaaaggtattctcgcacgcgtagatgggagccaagaaatcatgcctatcgtggcagaagtcctggggattctgggttggagcgataag

SEQ ID NO: 3058 - protein, 231 aa, synthetic construct
  REGION 1..231: note = variant of adenylate kinase from Thermotoga neapolitana
MHHHHHHGGSGMGAYLVLLGPPGAGKGTQGRIISAKTGIPHISTGDILRQIVAKQNDEVASSIKEWMLKGELVPDEIGNPVVKRRLKEKDCEKGFILDGFPRTARQAEYLDSFLESQGRQLTAAVLLEVPEDEVVVRLLSRRVCPKCGRSFNMIFLVPKEDELCDDCGVSLMQRFDDKEETVRMRLKVYREKTQPVIDYYSKKGILARVDGSQEIMPIVAEVLGILGWSDK

SEQ ID NO: 3059 - DNA, 693 bp, synthetic construct
  misc_feature 1..693: note = variant of adenylate kinase from Thermotoga neapolitana
  source 1..693: mol_type = other DNA
atgcaccatcatcaccatcacgggggctccggcatgggggcatatctggtgttattaggtccgccgggcgcgggaaaaggtacccaaggccgtattatttcggcaaagactggcatcccgcatattagcacgggcgatatcctgcgtcagatcgtcgctaagcaaaacgatgaagttgcctcgagcattaaagaatggatggcgaaaggtgaactcgttccagatgaaattggtaatcctgtagtaaaacgccgcctgaaggagaaagattgcgaaaaaggctttattttggatggtttcccgcgtaccgcgcgtcaagcggaatatctggatagttttcttgaatcgcagggccgccagttgacagccgccgtgctgctggaggtccccgaagatgaagttgttgtgcgtctgctgtctcgccgtgtttgtccgaaatgcgggcgtagttttaacatgatttttctggtgccaaaagaagacgagctgtgtgacgattgcggtgtcagtttagtacagcgtttcgatgataaggaagaaacggtccgtatgcgcctgaaagtctaccgtgagaagacccagccggtcattgactattatagtaagaaaggtattctcgcacgcgtagatgggagccaagaaatcatgcctatcgtggcagaagtcctggggattctgggttggagcgataag

SEQ ID NO: 3060 - protein, 231 aa, synthetic construct
  REGION 1..231: note = variant of adenylate kinase from Thermotoga neapolitana
MHHHHHHGGSGMGAYLVLLGPPGAGKGTQGRIISAKTGIPHISTGDILRQIVAKQNDEVASSIKEWMAKGELVPDEIGNPVVKRRLKEKDCEKGFILDGFPRTARQAEYLDSFLESQGRQLTAAVLLEVPEDEVVVRLLSRRVCPKCGRSFNMIFLVPKEDELCDDCGVSLVQRFDDKEETVRMRLKVYREKTQPVIDYYSKKGILARVDGSQEIMPIVAEVLGILGWSDK

SEQ ID NO: 3061 - DNA, 693 bp, synthetic construct
  misc_feature 1..693: note = variant of adenylate kinase from Thermotoga neapolitana
  source 1..693: mol_type = other DNA
atgcaccatcatcaccatcacgggggctccggcatgggggcatatctggtgttattaggtccgccgggcgcgggaaaaggtacccaaggccgtattatttcggcaaagactggcatcccgcatattagcacgggcgatatcctgcgtcagatcgtcgctaagcaaaacgatgaagttgcctcgagcattaaagaatggatgctgaaaggtgaactcgttccagatgaaattggtaatcctgtagtaaaacgccgcctgaaggagaaagattgcgaaaaaggctttattttggatggtttcccgcgtaccgcgcgtcaagcggaatatctggatagttttcttgaatcgcagggccgccagttgacagccgccgtgctgctggaggtccccgaagatgaagttgttgtgcgtctgctgtctcgccgtgtttgtccgaaatgcgggcgtagttttaacatgatttttctggtgccaaaagaagacgagctgtgtgacgattgcggtgtcagtttagtacagcgtttcgatgataaggaagaaacggggcgtatgcgcctgaaagtctaccgtgagaagacccagccggtcattgactattatagtaagaaaggtattctcgcacgcgtagatgggagccaagaaatcatgcctatcgtggcagaagtcctggggattctgggttggagcgataag

SEQ ID NO: 3062 - protein, 231 aa, synthetic construct
  REGION 1..231: note = variant of adenylate kinase from Thermotoga neapolitana
MHHHHHHGGSGMGAYLVLLGPPGAGKGTQGRIISAKTGIPHISTGDILRQIVAKQNDEVASSIKEWMLKGELVPDEIGNPVVKRRLKEKDCEKGFILDGFPRTARQAEYLDSFLESQGRQLTAAVLLEVPEDEVVVRLLSRRVCPKCGRSFNMIFLVPKEDELCDDCGVSLVQRFDDKEETGRMRLKVYREKTQPVIDYYSKKGILARVDGSQEIMPIVAEVLGILGWSDK

SEQ ID NO: 3063 - DNA, 693 bp, synthetic construct
  misc_feature 1..693: note = variant of adenylate kinase from Thermotoga neapolitana
  source 1..693: mol_type = other DNA
atgcaccatcatcaccatcacgggggctccggcatgggggcatatctggtgttattaggtccgccgggcgcgggaaaaggtacccaaggccgtattatttcggcaaagactggcatcccgcatattagcacgggcgatatcctgcgtcagatcgtcgctaagcaaaacgatgaagttgcctcgagcattaaagaatggatgctgaaaggtgaactcgttccagatgaaattggtaatcctgtagtaaaacgccgcctgaaggagaaagattgcgaaaaaggctttattttggatggtttcccgcgtaccgcgcgtcaagcggaatatctggatagttttcttgaatcgcagggccgccagttgacagccgccgtgctgctggaggtccccgaagatgaagttgttgtgcgtctgctgtctcgccgtgtttgtccgaaatgcgggcgtagttttaacatgatttttctggtgccaaaagaagacgagctgtgtgacgattgcggtgtcagtttagtacagcgtttcgatgataaggaagaaacggtccgtatgcgcctgaaagtctaccgtgagaagacccagccggtcattgactattatagtaagaaaggtattctcgcacgcgtagatgggagccaagaaatcatgcctatcgtggcagaagtcctggggattctgggtgatagcgataag

SEQ ID NO: 3064 - protein, 231 aa, synthetic construct
  REGION 1..231: note = variant of adenylate kinase from Thermotoga neapolitana
MHHHHHHGGSGMGAYLVLLGPPGAGKGTQGRIISAKTGIPHISTGDILRQIVAKQNDEVASSIKEWMLKGELVPDEIGNPVVKRRLKEKDCEKGFILDGFPRTARQAEYLDSFLESQGRQLTAAVLLEVPEDEVVVRLLSRRVCPKCGRSFNMIFLVPKEDELCDDCGVSLVQRFDDKEETVRMRLKVYREKTQPVIDYYSKKGILARVDGSQEIMPIVAEVLGILGDSDK

SEQ ID NO: 3065 - DNA, 693 bp, synthetic construct
  misc_feature 1..693: note = variant of adenylate kinase from Thermotoga neapolitana
  source 1..693: mol_type = other DNA
atgcaccatcatcaccatcacgggggctccggcatgggggcatatctggtgttattaggtccgccgggcgcgggaaaaggtacccaaggccgtattatttcggcaaagactggcatcccgcatattagcacgggcgatatcctgcgtcagatcgtcgctaagcaaaacgatgaagttgcctcgagcattaaagaatggatgctgaaaggtgaactcgttcaggatgaaattggtaatcctgtagtaaaacgccgcctgaaggagaaagattgcgaaaaaggctttattttggatggtttcccgcgtaccgcgcgtcaagcggaatatctggatagttttcttgaatcgcagggccgccagttgacagccgccgtgctgctggaggtccccgaagatgaagttgttgtgcgtctgctgtctcgccgtgtttgtccgaaatgcgggcgtagttttaacatgatttttctggtgccaaaagaagacgagctgtgtgacgattgcggtgtcagtttagtacagcgtttcgatgataaggaagaaacggtccgtatgcgcctgaaagtctaccgtgagaagacccagccggtcattgactattatagtaagaaaggtattctcgcacgcgtagatgggagccaagaaatcatgcctatcgtggcagaagtcctggggattctgggttggagcgataag

SEQ ID NO: 3066 - protein, 231 aa, synthetic construct
  REGION 1..231: note = variant of adenylate kinase from Thermotoga neapolitana
MHHHHHHGGSGMGAYLVLLGPPGAGKGTQGRIISAKTGIPHISTGDILRQIVAKQNDEVASSIKEWMLKGELVQDEIGNPVVKRRLKEKDCEKGFILDGFPRTARQAEYLDSFLESQGRQLTAAVLLEVPEDEVVVRLLSRRVCPKCGRSFNMIFLVPKEDELCDDCGVSLVQRFDDKEETVRMRLKVYREKTQPVIDYYSKKGILARVDGSQEIMPIVAEVLGILGWSDK

SEQ ID NO: 3067 - DNA, 693 bp, synthetic construct
  misc_feature 1..693: note = variant of adenylate kinase from Thermotoga neapolitana
  source 1..693: mol_type = other DNA
atgcaccatcatcaccatcacgggggctccggcatgggggcatatctggtgttattaggtccgccgggcgcgggaaaaggtacccaaggccgtattatttcggcaaagactggcatcccgcatattagcacgggcgatatcctgcgtcagatcgtcgctaagcaaaacgatgaagttgcctcgagcattaaagaatggatgctgaaaggtgaactcgttccagatgaaattggtaatcctgtagtaaaacgccgcctgaaggagaaagattgcgaaaaaggctttattttggatggtttcccgcgtaccgcgcgtcaagcggaatatctggatagttttcttgaatcgcagggccgccagttgacagccgccgtgctgctggaggtccccgaagatgaagttgttgtgcgtctgctgtctcgccgtgtttgtccgaaatgcgggcgtagttttaacatgatttttctggtgccaaaagaagacgagctgtgtgacgattgcggtgtccatttagtacagcgtttcgatgataaggaagaaacggtccgtatgcgcctgaaagtctaccgtgagaagacccagccggtcattgactattatagtaagaaaggtattctcgcacgcgtagatgggagccaagaaatcatgcctatcgtggcagaagtcctggggattctgggttggagcgataag

SEQ ID NO: 3068 - protein, 231 aa, synthetic construct
  REGION 1..231: note = variant of adenylate kinase from Thermotoga neapolitana
MHHHHHHGGSGMGAYLVLLGPPGAGKGTQGRIISAKTGIPHISTGDILRQIVAKQNDEVASSIKEWMLKGELVPDEIGNPVVKRRLKEKDCEKGFILDGFPRTARQAEYLDSFLESQGRQLTAAVLLEVPEDEVVVRLLSRRVCPKCGRSFNMIFLVPKEDELCDDCGVHLVQRFDDKEETVRMRLKVYREKTQPVIDYYSKKGILARVDGSQEIMPIVAEVLGILGWSDK

SEQ ID NO: 3069 - DNA, 693 bp, synthetic construct
  misc_feature 1..693: note = variant of adenylate kinase from Thermotoga neapolitana
  source 1..693: mol_type = other DNA
atgcaccatcatcaccatcacgggggctccggcatgggggcatatctggtgttattaggtccgccgggcgcgggaaaaggtacccaaggccgtattatttcggcaaagactggcatcccgcatattagcacgggcgatatcctgcgtcagatcgtcgctaagcaaaacgatgaagttgcctcgagcattaaagaatggatgctgaaaggtgaactcgttccagatgaaattggtaatcctgtagtaaaacgccgcctgaaggagaaagattgcgaaaaaggctttattttggatggtttcccgcgtaccgcgcgtcaagcggaatatctggatagttttcttgaatcgcagggccgccagttgacagccgccgtgctgctggaggtccccgaagatgaagttgttgtgcgtctgctgtctcgccgtgtttgtccgaaatgcgggcgtagttttaacatgatttttctggtgccaaaagaagacgagctgtgtgacgattgcggtgtcagtttagtacagcgtttcgatgataaggaagaaacggtccgtatgcgcctgaaagtctaccgtgagaagacccagccggtcattgactattatagtaagaaaggtattctcgcacgcgtagatgggagccaagaaatcatgcctatcgtggcagaagtcctggggattaagggttggagcgataag

SEQ ID NO: 3070 - protein, 231 aa, synthetic construct
  REGION 1..231: note = variant of adenylate kinase from Thermotoga neapolitana
MHHHHHHGGSGMGAYLVLLGPPGAGKGTQGRIISAKTGIPHISTGDILRQIVAKQNDEVASSIKEWMLKGELVPDEIGNPVVKRRLKEKDCEKGFILDGFPRTARQAEYLDSFLESQGRQLTAAVLLEVPEDEVVVRLLSRRVCPKCGRSFNMIFLVPKEDELCDDCGVSLVQRFDDKEETVRMRLKVYREKTQPVIDYYSKKGILARVDGSQEIMPIVAEVLGIKGWSDK

SEQ ID NO: 3071 - DNA, 693 bp, synthetic construct
  misc_feature 1..693: note = variant of adenylate kinase from Thermotoga neapolitana
  source 1..693: mol_type = other DNA
atgcaccatcatcaccatcacgggggctccggcatgggggcatatctggtgttattaggtccgccgggcgcgggaaaaggtacccaaggccgtattatttcggcaaagactggcatcccgcatattagcacgggcgatatcctgcgtcagatcgtcgctaagcaaaacgatgaatgggcctcgagcattaaagaatggatgctgaaaggtgaactcgttccagatgaaattggtaatcctgtagtaaaacgccgcctgaaggagaaagattgcgaaaaaggctttattttggatggtttcccgcgtaccgcgcgtcaagcggaatatctggatagttttcttgaatcgcagggccgccagttgacagccgccgtgctgctggaggtccccgaagatgaagttgttgtgcgtctgctgtctcgccgtgtttgtccgaaatgcgggcgtagttttaacatgatttttctggtgccaaaagaagacgagctgtgtgacgattgcggtgtcagtttagtacagcgtttcgatgataaggaagaaacggtccgtatgcgcctgaaagtctaccgtgagaagacccagccggtcattgactattatagtaagaaaggtattctcgcacgcgtagatgggagccaagaaatcatgcctatcgtggcagaagtcctggggattctgggttggagcgataag

SEQ ID NO: 3072 - protein, 231 aa, synthetic construct
  REGION 1..231: note = variant of adenylate kinase from Thermotoga neapolitana
MHHHHHHGGSGMGAYLVLLGPPGAGKGTQGRIISAKTGIPHISTGDILRQIVAKQNDEWASSIKEWMLKGELVPDEIGNPVVKRRLKEKDCEKGFILDGFPRTARQAEYLDSFLESQGRQLTAAVLLEVPEDEVVVRLLSRRVCPKCGRSFNMIFLVPKEDELCDDCGVSLVQRFDDKEETVRMRLKVYREKTQPVIDYYSKKGILARVDGSQEIMPIVAEVLGILGWSDK

SEQ ID NO: 3073 - DNA, 693 bp, synthetic construct
  misc_feature 1..693: note = variant of adenylate kinase from Thermotoga neapolitana
  source 1..693: mol_type = other DNA
atgcaccatcatcaccatcacgggggctccggcatgggggcatatctggtgttattaggtccgccgggcgcgggaaaaggtacccaaggccgtattatttcggcaaagactggcatcccgcatattagcacgggcgatatcctgcgtcagatcgtcgctaagcaaaacgatgaagttgcctcgagcattaaagaatggatgctgaaaggtgaactcgttccagatgaaattggtaatcctgtagtaaaacgccgcctgaaggagaaagattgcgaaaaaggctttattttggatggtttcccgcgtaccgcgcgtcaagcggaatatctggatagttggcttgaatcgcagggccgccagttgacagccgccgtgctgctggaggtccccgaagatgaagttgttgtgcgtctgctgtctcgccgtgtttgtccgaaatgcgggcgtagttttaacatgatttttctggtgccaaaagaagacgagctgtgtgacgattgcggtgtcagtttagtacagcgtttcgatgataaggaagaaacggtccgtatgcgcctgaaagtctaccgtgagaagacccagccggtcattgactattatagtaagaaaggtattctcgcacgcgtagatgggagccaagaaatcatgcctatcgtggcagaagtcctggggattctgggttggagcgataag

SEQ ID NO: 3074 - protein, 231 aa, synthetic construct
  REGION 1..231: note = variant of adenylate kinase from Thermotoga neapolitana
MHHHHHHGGSGMGAYLVLLGPPGAGKGTQGRIISAKTGIPHISTGDILRQIVAKQNDEVASSIKEWMLKGELVPDEIGNPVVKRRLKEKDCEKGFILDGFPRTARQAEYLDSWLESQGRQLTAAVLLEVPEDEVVVRLLSRRVCPKCGRSFNMIFLVPKEDELCDDCGVSLVQRFDDKEETVRMRLKVYREKTQPVIDYYSKKGILARVDGSQEIMPIVAEVLGILGWSDK

SEQ ID NO: 3075 - DNA, 693 bp, synthetic construct
  misc_feature 1..693: note = variant of adenylate kinase from Thermotoga neapolitana
  source 1..693: mol_type = other DNA
atgcaccatcatcaccatcacgggggctccggcatgggggcatatctggtgttattaggtccgccgggcgcgggaaaaggtacccaaggccgtattatttcggcaaagactggcatcccgcatattagcacgggcgatatcctgcgtcagatcgtcgctaagcaaaacgatgaagttgcctcgagcattaaagaatggatgctgaaaggtgaactcgttccagatgaaattggtaatcctgtagtaaaacgccgcctgaaggagaaagattgcgaaaaaggctttattttggatggtttcccgcgtaccgcgcgtcaagcggaatatctggatagttttcttgaatcgcagggctcgcagttgacagccgccgtgctgctggaggtccccgaagatgaagttgttgtgcgtctgctgtctcgccgtgtttgtccgaaatgcgggcgtagttttaacatgatttttctggtgccaaaagaagacgagctgtgtgacgattgcggtgtcagtttagtacagcgtttcgatgataaggaagaaacggtccgtatgcgcctgaaagtctaccgtgagaagacccagccggtcattgactattatagtaagaaaggtattctcgcacgcgtagatgggagccaagaaatcatgcctatcgtggcagaagtcctggggattctgggttggagcgataag

SEQ ID NO: 3076 - protein, 231 aa, synthetic construct
  REGION 1..231: note = variant of adenylate kinase from Thermotoga neapolitana
MHHHHHHGGSGMGAYLVLLGPPGAGKGTQGRIISAKTGIPHISTGDILRQIVAKQNDEVASSIKEWMLKGELVPDEIGNPVVKRRLKEKDCEKGFILDGFPRTARQAEYLDSFLESQGSQLTAAVLLEVPEDEVVVRLLSRRVCPKCGRSFNMIFLVPKEDELCDDCGVSLVQRFDDKEETVRMRLKVYREKTQPVIDYYSKKGILARVDGSQEIMPIVAEVLGILGWSDK

SEQ ID NO: 3077 - DNA, 693 bp, synthetic construct
  misc_feature 1..693: note = variant of adenylate kinase from Thermotoga neapolitana
  source 1..693: mol_type = other DNA
atgcaccatcatcaccatcacgggggctccggcatgggggcatatctggtgttattaggtccgccgggcgcgggaaaaggtacccaaggccgtattatttcggcaaagactggcatcccgcatattagcacgggcgatatcctgcgtcagatcgtcgctaagcaaaacgatgaagttgcctcgagcattaaagaatggatgctgaaaggtgaactcgttccagatgaaattggtaatcctgtagtaaaacgccgcctgaaggagaaagattgcgaaaaaggctttattttggatggtttcccgcgtaccgcgcgtcaagcggaatatctggatagttttcttgaatcgcagggccgccagttgacagccgccgtgctgctggaggtccccgaagatgaagttgttgtgcgtctgctgtctcgccgtgtttgtccgaaatgcgggcgtagttttaacatgatttttctggtgccaaaagaagacgagctgtgtgacgattgcggtgtcagtttagtacagcgtttcgatgataaggaagaaacgcttcgtatgcgcctgaaagtctaccgtgagaagacccagccggtcattgactattatagtaagaaaggtattctcgcacgcgtagatgggagccaagaaatcatgcctatcgtggcagaagtcctggggattctgggttggagcgataag

SEQ ID NO: 3078 - protein, 231 aa, synthetic construct
  REGION 1..231: note = variant of adenylate kinase from Thermotoga neapolitana
MHHHHHHGGSGMGAYLVLLGPPGAGKGTQGRIISAKTGIPHISTGDILRQIVAKQNDEVASSIKEWMLKGELVPDEIGNPVVKRRLKEKDCEKGFILDGFPRTARQAEYLDSFLESQGRQLTAAVLLEVPEDEVVVRLLSRRVCPKCGRSFNMIFLVPKEDELCDDCGVSLVQRFDDKEETLRMRLKVYREKTQPVIDYYSKKGILARVDGSQEIMPIVAEVLGILGWSDK

SEQ ID NO: 3079 - DNA, 693 bp, synthetic construct
  misc_feature 1..693: note = variant of adenylate kinase from Thermotoga neapolitana
  source 1..693: mol_type = other DNA
atgcaccatcatcaccatcacgggggctccggcatgggggcatatctggtgttattaggtccgccgggcgcgggaaaaggtacccaaggccgtattatttcggcaaagactggcatcccgcatattagcacgggcgatatcctgcgtcagatcgtcgctaagcaaaacgatgaagttgcctcgagcattaaagaatggatgctgaaaggtgaactcgttccagatgaaattggtcttcctgtagtaaaacgccgcctgaaggagaaagattgcgaaaaaggctttattttggatggtttcccgcgtaccgcgcgtcaagcggaatatctggatagttttcttgaatcgcagggccgccagttgacagccgccgtgctgctggaggtccccgaagatgaagttgttgtgcgtctgctgtctcgccgtgtttgtccgaaatgcgggcgtagttttaacatgatttttctggtgccaaaagaagacgagctgtgtgacgattgcggtgtcagtttagtacagcgtttcgatgataaggaagaaacggtccgtatgcgcctgaaagtctaccgtgagaagacccagccggtcattgactattatagtaagaaaggtattctcgcacgcgtagatgggagccaagaaatcatgcctatcgtggcagaagtcctggggattctgggttggagcgataag

SEQ ID NO: 3080 - protein, 231 aa, synthetic construct
  REGION 1..231: note = variant of adenylate kinase from Thermotoga neapolitana
MHHHHHHGGSGMGAYLVLLGPPGAGKGTQGRIISAKTGIPHISTGDILRQIVAKQNDEVASSIKEWMLKGELVPDEIGLPVVKRRLKEKDCEKGFILDGFPRTARQAEYLDSFLESQGRQLTAAVLLEVPEDEVVVRLLSRRVCPKCGRSFNMIFLVPKEDELCDDCGVSLVQRFDDKEETVRMRLKVYREKTQPVIDYYSKKGILARVDGSQEIMPIVAEVLGILGWSDK

SEQ ID NO: 3081 - DNA, 693 bp, synthetic construct
  misc_feature 1..693: note = variant of adenylate kinase from Thermotoga neapolitana
  source 1..693: mol_type = other DNA
atgcaccatcatcaccatcacgggggctccggcatgggggcatatctggtgttattaggtccgccgggcgcgggaaaaggtacccaaggccgtattatttcggcaaagactggcatcccgcatattagcacgggcgatatcctgcgtttgatcgtcgctaagcaaaacgatgaagttgcctcgagcattaaagaatggatgctgaaaggtgaactcgttccagatgaaattggtaatcctgtagtaaaacgccgcctgaaggagaaagattgcgaaaaaggctttattttggatggtttcccgcgtaccgcgcgtcaagcggaatatctggatagttttcttgaatcgcagggccgccagttgacagccgccgtgctgctggaggtccccgaagatgaagttgttgtgcgtctgctgtctcgccgtgtttgtccgaaatgcgggcgtagttttaacatgatttttctggtgccaaaagaagacgagctgtgtgacgattgcggtgtcagtttagtacagcgtttcgatgataaggaagaaacggtccgtatgcgcctgaaagtctaccgtgagaagacccagccggtcattgactattatagtaagaaaggtattctcgcacgcgtagatgggagccaagaaatcatgcctatcgtggcagaagtcctggggattctgggttggagcgataag

SEQ ID NO: 3082 - protein, 231 aa, synthetic construct
  REGION 1..231: note = variant of adenylate kinase from Thermotoga neapolitana
MHHHHHHGGSGMGAYLVLLGPPGAGKGTQGRIISAKTGIPHISTGDILRLIVAKQNDEVASSIKEWMLKGELVPDEIGNPVVKRRLKEKDCEKGFILDGFPRTARQAEYLDSFLESQGRQLTAAVLLEVPEDEVVVRLLSRRVCPKCGRSFNMIFLVPKEDELCDDCGVSLVQRFDDKEETVRMRLKVYREKTQPVIDYYSKKGILARVDGSQEIMPIVAEVLGILGWSDK

SEQ ID NO: 3083 - DNA, 693 bp, synthetic construct
  misc_feature 1..693: note = variant of adenylate kinase from Thermotoga neapolitana
  source 1..693: mol_type = other DNA
atgcaccatcatcaccatcacgggggctccggcatgggggcatatctggtgttattaggtccgccgggcgcgggaaaaggtacccaaggccgtattatttcggcaaagactggcatcccgcatattagcacgggcgatatcctgcgtcagatcgtcgctaagcaaaacgatgaagttgcctcgagcattaaagaatggatgctgaaaggtgaactcgttccagatctgattggtaatcctgtagtaaaacgccgcctgaaggagaaagattgcgaaaaaggctttattttggatggtttcccgcgtaccgcgcgtcaagcggaatatctggatagttttcttgaatcgcagggccgccagttgacagccgccgtgctgctggaggtccccgaagatgaagttgttgtgcgtctgctgtctcgccgtgtttgtccgaaatgcgggcgtagttttaacatgatttttctggtgccaaaagaagacgagctgtgtgacgattgcggtgtcagtttagtacagcgtttcgatgataaggaagaaacggtccgtatgcgcctgaaagtctaccgtgagaagacccagccggtcattgactattatagtaagaaaggtattctcgcacgcgtagatgggagccaagaaatcatgcctatcgtggcagaagtcctggggattctgggttggagcgataag

SEQ ID NO: 3084 - protein, 231 aa, synthetic construct
  REGION 1..231: note = variant of adenylate kinase from Thermotoga neapolitana
MHHHHHHGGSGMGAYLVLLGPPGAGKGTQGRIISAKTGIPHISTGDILRQIVAKQNDEVASSIKEWMLKGELVPDLIGNPVVKRRLKEKDCEKGFILDGFPRTARQAEYLDSFLESQGRQLTAAVLLEVPEDEVVVRLLSRRVCPKCGRSFNMIFLVPKEDELCDDCGVSLVQRFDDKEETVRMRLKVYREKTQPVIDYYSKKGILARVDGSQEIMPIVAEVLGILGWSDK

SEQ ID NO: 3085 - DNA, 693 bp, synthetic construct
  misc_feature 1..693: note = variant of adenylate kinase from Thermotoga neapolitana
  source 1..693: mol_type = other DNA
atgcaccatcatcaccatcacgggggctccggcatgggggcatatctggtgttattaggtccgccgggcgcgggaaaaggtacccaaggccgtattatttcggcaaagactggcatcccgcatattagcacgggcgatatcctgcgtcagatcgtcgctaagcaaaacgatgaagttgcctcgagcattaaagaatggatgctgaaaggtgaactcgttccagatgaaattggttggcctgtagtaaaacgccgcctgaaggagaaagattgcgaaaaaggctttattttggatggtttcccgcgtaccgcgcgtcaagcggaatatctggatagttttcttgaatcgcagggccgccagttgacagccgccgtgctgctggaggtccccgaagatgaagttgttgtgcgtctgctgtctcgccgtgtttgtccgaaatgcgggcgtagttttaacatgatttttctggtgccaaaagaagacgagctgtgtgacgattgcggtgtcagtttagtacagcgtttcgatgataaggaagaaacggtccgtatgcgcctgaaagtctaccgtgagaagacccagccggtcattgactattatagtaagaaaggtattctcgcacgcgtagatgggagccaagaaatcatgcctatcgtggcagaagtcctggggattctgggttggagcgataag

SEQ ID NO: 3086 - protein, 231 aa, synthetic construct
  REGION 1..231: note = variant of adenylate kinase from Thermotoga neapolitana
MHHHHHHGGSGMGAYLVLLGPPGAGKGTQGRIISAKTGIPHISTGDILRQIVAKQNDEVASSIKEWMLKGELVPDEIGWPVVKRRLKEKDCEKGFILDGFPRTARQAEYLDSFLESQGRQLTAAVLLEVPEDEVVVRLLSRRVCPKCGRSFNMIFLVPKEDELCDDCGVSLVQRFDDKEETVRMRLKVYREKTQPVIDYYSKKGILARVDGSQEIMPIVAEVLGILGWSDK

SEQ ID NO: 3087 - DNA, 693 bp, synthetic construct
  misc_feature 1..693: note = variant of adenylate kinase from Thermotoga neapolitana
  source 1..693: mol_type = other DNA
atgcaccatcatcaccatcacgggggctccggcatgggggcatatctggtgttattaggtccgccgggcgcgggaaaaggtacccaaggccgtattatttcggcaaagactggcatcccgcatattagcacgggcgatatcctgcgtcagatcgtcgctaagcaaaacgatgaagttgcctcgagcattaaagaatggatgctgaaaggtgaactcgttccagatgaaattggtaatcctgtagtaaaacgccgcctgaaggagaaagattgcgaaaaaggctttattttggatggtttcccgcgtaccgcgcgtcaagcggaatatctggatagttttcttgaatcgcagggccgccagttgacagccgccgtgctgctggaggtccccgaagatgaagttgttgtgcgtctgctgtctcgccgtgtttgtccgaaatgcgggcgtagttttaacatgatttttctggtgccaaaagaagacgagctgtgtgacgattgcggtgtcagtttagtacagcgtttcgatgataaggaagaaacgcagcgtatgcgcctgaaagtctaccgtgagaagacccagccggtcattgactattatagtaagaaaggtattctcgcacgcgtagatgggagccaagaaatcatgcctatcgtggcagaagtcctggggattctgggttggagcgataag

SEQ ID NO: 3088 - protein, 231 aa, synthetic construct
  REGION 1..231: note = variant of adenylate kinase from Thermotoga neapolitana
MHHHHHHGGSGMGAYLVLLGPPGAGKGTQGRIISAKTGIPHISTGDILRQIVAKQNDEVASSIKEWMLKGELVPDEIGNPVVKRRLKEKDCEKGFILDGFPRTARQAEYLDSFLESQGRQLTAAVLLEVPEDEVVVRLLSRRVCPKCGRSFNMIFLVPKEDELCDDCGVSLVQRFDDKEETQRMRLKVYREKTQPVIDYYSKKGILARVDGSQEIMPIVAEVLGILGWSDK

SEQ ID NO: 3089 - DNA, 693 bp, synthetic construct
  misc_feature 1..693: note = variant of adenylate kinase from Thermotoga neapolitana
  source 1..693: mol_type = other DNA
atgcaccatcatcaccatcacgggggctccggcatgggggcatatctggtgttattaggtccgccgggcgcgggaaaaggtacccaaggccgtattatttcggcaaagactggcatcccgcatattagcacgggcgatatcctgcgtcagatcgtcgctaagcaaaacgatgaagttgcctcgagcattaaagaatggatgctgaaaggtgaactcgttccagatgaaattggtaatcctgtagtaaaacgccgcctgaaggagaaaaagtgcgaaaaaggctttattttggatggtttcccgcgtaccgcgcgtcaagcggaatatctggatagttttcttgaatcgcagggccgccagttgacagccgccgtgctgctggaggtccccgaagatgaagttgttgtgcgtctgctgtctcgccgtgtttgtccgaaatgcgggcgtagttttaacatgatttttctggtgccaaaagaagacgagctgtgtgacgattgcggtgtcagtttagtacagcgtttcgatgataaggaagaaacggtccgtatgcgcctgaaagtctaccgtgagaagacccagccggtcattgactattatagtaagaaaggtattctcgcacgcgtagatgggagccaagaaatcatgcctatcgtggcagaagtcctggggattctgggttggagcgataag

SEQ ID NO: 3090 - protein, 231 aa, synthetic construct
  REGION 1..231: note = variant of adenylate kinase from Thermotoga neapolitana
MHHHHHHGGSGMGAYLVLLGPPGAGKGTQGRIISAKTGIPHISTGDILRQIVAKQNDEVASSIKEWMLKGELVPDEIGNPVVKRRLKEKKCEKGFILDGFPRTARQAEYLDSFLESQGRQLTAAVLLEVPEDEVVVRLLSRRVCPKCGRSFNMIFLVPKEDELCDDCGVSLVQRFDDKEETVRMRLKVYREKTQPVIDYYSKKGILARVDGSQEIMPIVAEVLGILGWSDK

SEQ ID NO: 3091 - DNA, 693 bp, synthetic construct
  misc_feature 1..693: note = variant of adenylate kinase from Thermotoga neapolitana
  source 1..693: mol_type = other DNA
atgcaccatcatcaccatcacgggggctccggcatgggggcatatctggtgttattaggtccgccgggcgcgggaaaaggtacccaaggccgtattatttcggcaaagactggcatcccgcatattagcacgggcgatatcctgcgtcagatcgtcgctaagcaaaacgatgaagttgcctcgagcattaaagaatggatgctgaaaggtgaactcgttccagatgaaattggtaatcctgtagtaaaacgccgcctgaaggagaaagattgcgaaaaaggctttattttggatggtttcccgcgtaccgcgcgtcaagcggaatatctggatagttttcttgaatcgcagggccgccagttgacagccgccgtgctgctggaggtccccgaagatgaagttgttgtgcgtctgctgtctcgccgtgtttgtccgaaatgcgggcgtagttttaacatgatttttctggtgccaaaagaagacgagctgtgtgacgattgcggtgtcagtttagtacagcgtttcgatgataaggaagaaacggtccgtatgcgcctgaaagtctaccgtgagaagacccagccggtcattgactattatagtaagaaaggtattctcgcacgcgtagatgggagccaagaaatcatgcctatcgtggcagaagtcctggggattctgggttggagcatgaag

SEQ ID NO: 3092 - protein, 231 aa, synthetic construct
  REGION 1..231: note = variant of adenylate kinase from Thermotoga neapolitana
MHHHHHHGGSGMGAYLVLLGPPGAGKGTQGRIISAKTGIPHISTGDILRQIVAKQNDEVASSIKEWMLKGELVPDEIGNPVVKRRLKEKDCEKGFILDGFPRTARQAEYLDSFLESQGRQLTAAVLLEVPEDEVVVRLLSRRVCPKCGRSFNMIFLVPKEDELCDDCGVSLVQRFDDKEETVRMRLKVYREKTQPVIDYYSKKGILARVDGSQEIMPIVAEVLGILGWSMK

SEQ ID NO: 3093 - DNA, 693 bp, synthetic construct
  misc_feature 1..693: note = variant of adenylate kinase from Thermotoga neapolitana
  source 1..693: mol_type = other DNA
atgcaccatcatcaccatcacgggggctccggcatgggggcatatctggtgttattaggtccgccgggcgcgggaaaaggtacccaaggccgtattatttcggcaaagactggcatcccgcatattagcacgggcgatatcctgcgtcagatcgtcgctaagcaaaacgattgtgttgcctcgagcattaaagaatggatgctgaaaggtgaactcgttccagatgaaattggtaatcctgtagtaaaacgccgcctgaaggagaaagattgcgaaaaaggctttattttggatggtttcccgcgtaccgcgcgtcaagcggaatatctggatagttttcttgaatcgcagggccgccagttgacagccgccgtgctgctggaggtccccgaagatgaagttgttgtgcgtctgctgtctcgccgtgtttgtccgaaatgcgggcgtagttttaacatgatttttctggtgccaaaagaagacgagctgtgtgacgattgcggtgtcagtttagtacagcgtttcgatgataaggaagaaacggtccgtatgcgcctgaaagtctaccgtgagaagacccagccggtcattgactattatagtaagaaaggtattctcgcacgcgtagatgggagccaagaaatcatgcctatcgtggcagaagtcctggggattctgggttggagcgataag

SEQ ID NO: 3094 - protein, 231 aa, synthetic construct
  REGION 1..231: note = variant of adenylate kinase from Thermotoga neapolitana
MHHHHHHGGSGMGAYLVLLGPPGAGKGTQGRIISAKTGIPHISTGDILRQIVAKQNDCVASSIKEWMLKGELVPDEIGNPVVKRRLKEKDCEKGFILDGFPRTARQAEYLDSFLESQGRQLTAAVLLEVPEDEVVVRLLSRRVCPKCGRSFNMIFLVPKEDELCDDCGVSLVQRFDDKEETVRMRLKVYREKTQPVIDYYSKKGILARVDGSQEIMPIVAEVLGILGWSDK

SEQ ID NO: 3095 - DNA, 693 bp, synthetic construct
  misc_feature 1..693: note = variant of adenylate kinase from Thermotoga neapolitana
  source 1..693: mol_type = other DNA
atgcaccatcatcaccatcacgggggctccggcatgggggcatatctggtgttattaggtccgccgggcgcgggaaaaggtacccaaggccgtattatttcggcaaagactggcatcccgcatattagcacgggcgatatcctgcgtcagatcgtcgctaagcaaaacgatgaagttgcctcgagcattaaagaatggatgctgaaaggtgaactcgttccagatgaaattggtaatcctgtagtaaaacgccgcctgaaggagaaagattgcgaaaaaggctttattttggatggtttcccgcgtaccgcgcgtcaagcggaatatctggatagttttcttgaatcgcagggccgccagttgacagccgccgtgctgctggaggtccccgaagatgaagttgttgtgcgtctgctgtctcgccgtgtttgtccgaaatgcgggcgtagttttaacatgatttttctggtgccaaaagaagacgagctgtgtgacgattgcggtgtcagtttagtacagcgtttcgatgataaggaagaaacggtccgtatgcgcctgaaagtctaccgtgagaagacccagccggtcattgactattatagtaagaaaggtattctcgcacgcgtagatgggagccaagaaatcatgcctatcgtggcagaagtcctggggattctgggttggagcgatcgt

SEQ ID NO: 3096 - protein, 231 aa, synthetic construct
  REGION 1..231: note = variant of adenylate kinase from Thermotoga neapolitana
MHHHHHHGGSGMGAYLVLLGPPGAGKGTQGRIISAKTGIPHISTGDILRQIVAKQNDEVASSIKEWMLKGELVPDEIGNPVVKRRLKEKDCEKGFILDGFPRTARQAEYLDSFLESQGRQLTAAVLLEVPEDEVVVRLLSRRVCPKCGRSFNMIFLVPKEDELCDDCGVSLVQRFDDKEETVRMRLKVYREKTQPVIDYYSKKGILARVDGSQEIMPIVAEVLGILGWSDR

SEQ ID NO: 3097 - DNA, 693 bp, synthetic construct
  misc_feature 1..693: note = variant of adenylate kinase from Thermotoga neapolitana
  source 1..693: mol_type = other DNA
atgcaccatcatcaccatcacgggggctccggcatgggggcatatctggtgttattaggtccgccgggcgcgggaaaaggtacccaaggccgtattatttcggcaaagactggcatcccgcatattagcacgggcgatatcctgcgtcagatcgtcgctaagcaaaacgatgaagttgcctcgagcattaaagaatggatggagaaaggtgaactcgttccagatgaaattggtaatcctgtagtaaaacgccgcctgaaggagaaagattgcgaaaaaggctttattttggatggtttcccgcgtaccgcgcgtcaagcggaatatctggatagttttcttgaatcgcagggccgccagttgacagccgccgtgctgctggaggtccccgaagatgaagttgttgtgcgtctgctgtctcgccgtgtttgtccgaaatgcgggcgtagttttaacatgatttttctggtgccaaaagaagacgagctgtgtgacgattgcggtgtcagtttagtacagcgtttcgatgataaggaagaaacggtccgtatgcgcctgaaagtctaccgtgagaagacccagccggtcattgactattatagtaagaaaggtattctcgcacgcgtagatgggagccaagaaatcatgcctatcgtggcagaagtcctggggattctgggttggagcgataag

SEQ ID NO: 3098 - protein, 231 aa, synthetic construct
  REGION 1..231: note = variant of adenylate kinase from Thermotoga neapolitana
MHHHHHHGGSGMGAYLVLLGPPGAGKGTQGRIISAKTGIPHISTGDILRQIVAKQNDEVASSIKEWMEKGELVPDEIGNPVVKRRLKEKDCEKGFILDGFPRTARQAEYLDSFLESQGRQLTAAVLLEVPEDEVVVRLLSRRVCPKCGRSFNMIFLVPKEDELCDDCGVSLVQRFDDKEETVRMRLKVYREKTQPVIDYYSKKGILARVDGSQEIMPIVAEVLGILGWSDK

SEQ ID NO: 3099 - DNA, 693 bp, synthetic construct
  misc_feature 1..693: note = variant of adenylate kinase from Thermotoga neapolitana
  source 1..693: mol_type = other DNA
atgcaccatcatcaccatcacgggggctccggcatgggggcatatctggtgttattaggtccgccgggcgcgggaaaaggtacccaaggccgtattatttcggcaaagactggcatcccgcatattagcacgggcgatatcctgcgtcagatcgtcgctaagcaaaacgatgaagttgcctcgagcattaaagaatggatggtgaaaggtgaactcgttccagatgaaattggtaatcctgtagtaaaacgccgcctgaaggagaaagattgcgaaaaaggctttattttggatggtttcccgcgtaccgcgcgtcaagcggaatatctggatagttttcttgaatcgcagggccgccagttgacagccgccgtgctgctggaggtccccgaagatgaagttgttgtgcgtctgctgtctcgccgtgtttgtccgaaatgcgggcgtagttttaacatgatttttctggtgccaaaagaagacgagctgtgtgacgattgcggtgtcagtttagtacagcgtttcgatgataaggaagaaacggtccgtatgcgcctgaaagtctaccgtgagaagacccagccggtcattgactattatagtaagaaaggtattctcgcacgcgtagatgggagccaagaaatcatgcctatcgtggcagaagtcctggggattctgggttggagcgataag

SEQ ID NO: 3100 - protein, 231 aa, synthetic construct
  REGION 1..231: note = variant of adenylate kinase from Thermotoga neapolitana
MHHHHHHGGSGMGAYLVLLGPPGAGKGTQGRIISAKTGIPHISTGDILRQIVAKQNDEVASSIKEWMVKGELVPDEIGNPVVKRRLKEKDCEKGFILDGFPRTARQAEYLDSFLESQGRQLTAAVLLEVPEDEVVVRLLSRRVCPKCGRSFNMIFLVPKEDELCDDCGVSLVQRFDDKEETVRMRLKVYREKTQPVIDYYSKKGILARVDGSQEIMPIVAEVLGILGWSDK

SEQ ID NO: 3101 - DNA, 693 bp, synthetic construct
  misc_feature 1..693: note = variant of adenylate kinase from Thermotoga neapolitana
  source 1..693: mol_type = other DNA
atgcaccatcatcaccatcacgggggctccggcatgggggcatatctggtgttattaggtccgccgggcgcgggaaaaggtacccaaggccgtattatttcggcaaagactggcatcccgcatattagcacgggcgatatcctgcgtcagatcgtcgctaagcaaaacgatgaagttgcctcgagcattaaagaatggatgctgaaaggtgaactcgttccagatgaaattggtaatcctgtagtaaaacgccgcctgaaggagaaagattgcgaaaaaggctttattttggatggtttcccgcgtaccgcgcgtcaagcggaatatctggatagttttcttgaatcgcagggccgccagttgacagccgccgtgctgctggaggtccccgaagatgaagttgttgtgcgtctgctgtctcgccgtgtttgtccgaaatgcgggcgtagttttaacatgatttttctggtgccaaaagaagacgagctgtgtgacgattgcggtgtcagtttagtacagcgtttcgatgataaggaagaaacggtccgtcggcgcctgaaagtctaccgtgagaagacccagccggtcattgactattatagtaagaaaggtattctcgcacgcgtagatgggagccaagaaatcatgcctatcgtggcagaagtcctggggattctgggttggagcgataag

SEQ ID NO: 3102 - protein, 231 aa, synthetic construct
  REGION 1..231: note = variant of adenylate kinase from Thermotoga neapolitana
MHHHHHHGGSGMGAYLVLLGPPGAGKGTQGRIISAKTGIPHISTGDILRQIVAKQNDEVASSIKEWMLKGELVPDEIGNPVVKRRLKEKDCEKGFILDGFPRTARQAEYLDSFLESQGRQLTAAVLLEVPEDEVVVRLLSRRVCPKCGRSFNMIFLVPKEDELCDDCGVSLVQRFDDKEETVRRRLKVYREKTQPVIDYYSKKGILARVDGSQEIMPIVAEVLGILGWSDK

SEQ ID NO: 3103 - DNA, 693 bp, synthetic construct
  misc_feature 1..693: note = variant of adenylate kinase from Thermotoga neapolitana
  source 1..693: mol_type = other DNA
atgcaccatcatcaccatcacgggggctccggcatgggggcatatctggtgttattaggtccgccgggcgcgggaaaaggtacccaaggccgtattatttcggcaaagactggcatcccgcatattagcacgggcgatatcctgcgtcagatcgtcgctaagcaaaacgatgaagttgcgtcgagcattaaagaatggatgctgaaaggtgaactcgttccagatgaaattggtaatcctgtagtactgcgccgcctgaaggagaaagattgcgaaaaaggctttattttggatggtttcccgcgtaccgcgcgtcaagcggaatatctggatagttttcttgaatcgcagggccgccagttgacagccgccgtgctgctggaggtccccgaagatgaagttgttgtgcgtctgctgtctcgccgtgtttgtccgaaatgcgggcgtagttttaacatgatttttctggtgccaaaagaagacgagctgtgtgacgattgcggtgtcagtttagtacagcgtttcgatgataaggaagaaacggtccgtatgcgcctgaaagtctaccaggagaagacccagccggtcattgactattatgcgaagaaaggtattctcgcacgcgtagatgggagccaagaaatcgaacctatcgtggcagaagtcctggggattctgggttggagcgataag

SEQ ID NO: 3104 - protein, 231 aa, synthetic construct
  REGION 1..231: note = variant of adenylate kinase from Thermotoga neapolitana
MHHHHHHGGSGMGAYLVLLGPPGAGKGTQGRIISAKTGIPHISTGDILRQIVAKQNDEVASSIKEWMLKGELVPDEIGNPVVLRRLKEKDCEKGFILDGFPRTARQAEYLDSFLESQGRQLTAAVLLEVPEDEVVVRLLSRRVCPKCGRSFNMIFLVPKEDELCDDCGVSLVQRFDDKEETVRMRLKVYQEKTQPVIDYYAKKGILARVDGSQEIEPIVAEVLGILGWSDK

SEQ ID NO: 3105 - DNA, 693 bp, synthetic construct
  misc_feature 1..693: note = variant of adenylate kinase from Thermotoga neapolitana
  source 1..693: mol_type = other DNA
atgcaccatcatcaccatcacgggggctccggcatgggggcatatctggtgttattaggtccgccgggcgcgggaaaaggtacccaaggccgtattatttcggcaaagactggcatcccgcatattagcacgggcgatatcctgcgtcagatcgtcgctaagcaaaacgatgaagttgcgtcgagcattaaagaatggatgctgaaaggtgaactcgttccagatgaaattggtaatcctgtagtactgcgccgcctgaaggagaaagattgcgaaaaaggctttattttggatggtttcccgcgtaccgcgcgtcaagcggaatatctggatagttttcttgaatcgcagggccgccagttgacagccgccgtgctgctggaggtccccgaagatgaagttgttgtgcgtctgctgtctcgccgtgtttgtccgaaatgcgggcgtagttttaacatgatttttctggtgccaaaagaagacgagctgtgtgacgattgcggtgtcagtttagtacagcgtttcgatgataaggaagaaacggtccgtatgcgcctgaaagtctaccgtgagaagacccagccggtcattgactattatagtaagaaaggtattctcgcacgcgtagatgggagccaagaaatcgaacctatcgtggcagaagtcctggggattctgggttggagcgataag

SEQ ID NO: 3106 - protein, 231 aa, synthetic construct
  REGION 1..231: note = variant of adenylate kinase from Thermotoga neapolitana
MHHHHHHGGSGMGAYLVLLGPPGAGKGTQGRIISAKTGIPHISTGDILRQIVAKQNDEVASSIKEWMLKGELVPDEIGNPVVLRRLKEKDCEKGFILDGFPRTARQAEYLDSFLESQGRQLTAAVLLEVPEDEVVVRLLSRRVCPKCGRSFNMIFLVPKEDELCDDCGVSLVQRFDDKEETVRMRLKVYREKTQPVIDYYSKKGILARVDGSQEIEPIVAEVLGILGWSDK

SEQ ID NO: 3107 - DNA, 693 bp, synthetic construct
  misc_feature 1..693: note = variant of adenylate kinase from Thermotoga neapolitana
  source 1..693: mol_type = other DNA
atgcaccatcatcaccatcacgggggctccggcatgggggcatatctggtgttattaggtccgccgggcgcgggaaaaggtacccaaggccgtattatttcggcaaagactggcatcccgcatattagcacgggcgatatcctgcgtcagatcgtcgctaagcaaaacgatgaagttgcctcgagcattaaagaatggatgctgaaaggtgaactcgttccagatgaaattggttggcctgtagtaaaacgccgcctgaaggagaaagattgcgaaaaaggctttattttggatggtttcccgcgtaccgcgcgtcaagcggaatatctggatagttttcttgaatcgcagggccgccagttgacagccgccgtgctgctggaggtccccgaagatgaagttgttgtgcgtctgctgtctcgccgtgtttgtccgaaatgcgggcgtagttttaacatgatttttctggtgccaaaagaagacgagctgtgtgacgattgcggtgtcagtttagtacagcgtttcgatgataaggaagaaacggtccgtatgcgcctgaaagtctaccgtgagaagacccagccggtcattgactattatagtaagaaaggtattctcgcacgcgtagatgggagccaagaaatcatgcctatcgtggcagaagtcctggggattctgggtgtgagcgataag

SEQ ID NO: 3108 - protein, 231 aa, synthetic construct
  REGION 1..231: note = variant of adenylate kinase from Thermotoga neapolitana
MHHHHHHGGSGMGAYLVLLGPPGAGKGTQGRIISAKTGIPHISTGDILRQIVAKQNDEVASSIKEWMLKGELVPDEIGWPVVKRRLKEKDCEKGFILDGFPRTARQAEYLDSFLESQGRQLTAAVLLEVPEDEVVVRLLSRRVCPKCGRSFNMIFLVPKEDELCDDCGVSLVQRFDDKEETVRMRLKVYREKTQPVIDYYSKKGILARVDGSQEIMPIVAEVLGILGVSDK

SEQ ID NO: 3109 - DNA, 693 bp, synthetic construct
  misc_feature 1..693: note = variant of adenylate kinase from Thermotoga neapolitana
  source 1..693: mol_type = other DNA
atgcaccatcatcaccatcacgggggctccggcatgggggcatatctggtgttattaggtccgccgggcgcgggaaaaggtacccaaggccgtattatttcggcaaagactggcatcccgcatattagcacgggcgatatcctgcgtcagatcgtcgctaagcaaaacgatgaagttgcctcgagcattaaagaatggatgctgaaaggtgaactcgttccagatgaaattggtaatcctgtagtaaaacgccgcctgaaggagaaagattgcgaaaaaggctttattttggatggtttcccgcgtaccgcgcgtcaagcggaatatctggatagttttcttgaatcgcagggccgccagttgacagccgccgtgctgctggaggtccccgaagatgaagttgttgtgcgtctgctgtctcgccgtgtttgtccgaaatgcgggcgtagttttaacatgatttttctgccgccaaaagaagacgagctgtgtgacgattgcggtgtcagtttagtacagcgtttcgatgataaggaagaaacggtccgtatgcgcctgaaagtctaccaggagaagacccagccggtcattgactattatagtaagaaaggtattctcgcacgcgtagatgggagccaagaaatcgaacctatcgtggcagaagtcctggggattctgggttggagcgataag

SEQ ID NO: 3110 - protein, 231 aa, synthetic construct
  REGION 1..231: note = variant of adenylate kinase from Thermotoga neapolitana
MHHHHHHGGSGMGAYLVLLGPPGAGKGTQGRIISAKTGIPHISTGDILRQIVAKQNDEVASSIKEWMLKGELVPDEIGNPVVKRRLKEKDCEKGFILDGFPRTARQAEYLDSFLESQGRQLTAAVLLEVPEDEVVVRLLSRRVCPKCGRSFNMIFLPPKEDELCDDCGVSLVQRFDDKEETVRMRLKVYQEKTQPVIDYYSKKGILARVDGSQEIEPIVAEVLGILGWSDK

SEQ ID NO: 3111 - DNA, 693 bp, synthetic construct
  misc_feature 1..693: note = variant of adenylate kinase from Thermotoga neapolitana
  source 1..693: mol_type = other DNA
atgcaccatcatcaccatcacgggggctccggcatgggggcatatctggtgttattaggtccgccgggcgcgggaaaaggtacccaaggccgtattatttcggcaaagactggcatcccgcatattagcacgggcgatatcctgcgtcagatcgtcgctaagcaaaacgatgaagttgcgtcgagcattaaagaatggatgctgaaaggtgaactcgttccagatgaaattggtaatcctgtagtactgcgccgcctgaaggagaaagattgcgaaaaaggctttattttggatggtttcccgcgtacccgccgtcaagcggaatatctggatagttttcttgaatcgcagggccgccagttgacagccgccgtgctgctggaggtccccgaagatgaagttgttgtgcgtctgctgtctcgccgtgtttgtccgaaatgcgggcgtagttataacatgatttttctggtgccaaaagaagacgagctgtgtgacgattgcagtgtcagtttagtaacccgtttcgatgataaggaagaaacggtccgtatgcgcctgaaagtctaccaggagaagacccagccggtcattgactattatagtaagaaaggtattctcgcacgcgtagatgggagccaagaaatcatgcctatcgtggcagaagtcctggggattctgggttggagcgataag

SEQ ID NO: 3112 - protein, 231 aa, synthetic construct
  REGION 1..231: note = variant of adenylate kinase from Thermotoga neapolitana
MHHHHHHGGSGMGAYLVLLGPPGAGKGTQGRIISAKTGIPHISTGDILRQIVAKQNDEVASSIKEWMLKGELVPDEIGNPVVLRRLKEKDCEKGFILDGFPRTRRQAEYLDSFLESQGRQLTAAVLLEVPEDEVVVRLLSRRVCPKCGRSYNMIFLVPKEDELCDDCSVSLVTRFDDKEETVRMRLKVYQEKTQPVIDYYSKKGILARVDGSQEIMPIVAEVLGILGWSDK

SEQ ID NO: 3113 - DNA, 693 bp, synthetic construct
  misc_feature 1..693: note = variant of adenylate kinase from Thermotoga neapolitana
  source 1..693: mol_type = other DNA
atgcaccatcatcaccatcacgggggctccggcatgggggcatatctggtgttattaggtccgccgggcgcgggaaaaggtacccaaggccgtattatttcggcaaagactggcatcccgcatattagcacgggcgatatcctgcgtcagatcgtcgctaagcaaaacgatgaagttgcgtcgagcattaaagaatggatgctgaaaggtgaactcgttccagatgaaattggtaatcctgtagtactgcgccgcctgaaggagaaagattgcgaaaaaggctttattttggatggtttcccgcgtaccgcgcgtcaagcggaatatctggatagttttcttgaatcgcagggccgccagttgacagccgccgtgctgctggaggtccccgaagatgaagttgttgtgcgtctgctgtctcgccgtgtttgtccgaaatgcgggcgtagttttaacatgatttttctggtgccaaaagaagacgagctgtgtgacgattgcggtgtcagtttagtacagcgtttcgatgataaggaagaaacggtccgtatgcgcctgaaagtctaccgtgagaagacccagccggtcattgactattatagtaagaaaggtattctcgcacgcgtagatgggagccaagaaatcatgcctatcgtggcagaagtcctggggattctgggttggagcgataag

SEQ ID NO: 3114 - protein, 231 aa, synthetic construct
  REGION 1..231: note = variant of adenylate kinase from Thermotoga neapolitana
MHHHHHHGGSGMGAYLVLLGPPGAGKGTQGRIISAKTGIPHISTGDILRQIVAKQNDEVASSIKEWMLKGELVPDEIGNPVVLRRLKEKDCEKGFILDGFPRTARQAEYLDSFLESQGRQLTAAVLLEVPEDEVVVRLLSRRVCPKCGRSFNMIFLVPKEDELCDDCGVSLVQRFDDKEETVRMRLKVYREKTQPVIDYYSKKGILARVDGSQEIMPIVAEVLGILGWSDK

SEQ ID NO: 3115 - DNA, 693 bp, synthetic construct
  misc_feature 1..693: note = variant of adenylate kinase from Thermotoga neapolitana
  source 1..693: mol_type = other DNA
atgcaccatcatcaccatcacgggggctccggcatgggggcatatctggtgttattaggtccgccgggcgcgggaaaaggtacccaaggccgtattatttcggcaaagactggcatcccgcatattagcacgggcgatatcctgcgtcagatcgtcgctaagcaaaacgatgaagttgcctcgagcattaaagaatggatgctgaaaggtgaactcgttccagatgaaattggtaaccctgtagtaaaacgccgcctgaaggagaaagattgcgaaaaaggctttattttggatggtttcccgcgtaccgcgcgtcaagcggaatatctggatagttttcttgaatcgcagggccgccagttgacagccgccgtgctgctggaggtccccgaagatgaagttgttgtgcgtctgctgtctcgccgtgtttgtccgaaatgcgggcgtagttttaacatgatttttctggtgccaaaagaagacgagctgtgtgacgattgcggtgtcagtttagtacagcgtttcgatgataaggaagaaacggtccggatgcgcctgaaagtctaccgtgagaagacccagccggtcattgactattatagtaagaaaggtattctcgcacgcgtagatgggagccaagaaatcatgcctatcgtggcagaagtcctggggattctgggttggatcgataag

SEQ ID NO: 3116 - protein, 231 aa, synthetic construct
  REGION 1..231: note = variant of adenylate kinase from Thermotoga neapolitana
MHHHHHHGGSGMGAYLVLLGPPGAGKGTQGRIISAKTGIPHISTGDILRQIVAKQNDEVASSIKEWMLKGELVPDEIGNPVVKRRLKEKDCEKGFILDGFPRTARQAEYLDSFLESQGRQLTAAVLLEVPEDEVVVRLLSRRVCPKCGRSFNMIFLVPKEDELCDDCGVSLVQRFDDKEETVRMRLKVYREKTQPVIDYYSKKGILARVDGSQEIMPIVAEVLGILGWIDK

SEQ ID NO: 3117 - DNA, 693 bp, synthetic construct
  misc_feature 1..693: note = variant of adenylate kinase from Thermotoga neapolitana
  source 1..693: mol_type = other DNA
atgcaccatcatcaccatcacgggggctccggcatgggggcatatctggtgttattaggtccgccgggcgcgggaaaaggtacccaaggccgtattatttcggcaaagactggcatcccgcatattagcacgggcgatatcctgcgtcagatcgtcgctaagcaaaacgatgaagttgcctcgagcattaaagaatggatgctgaaaggtgaactcgttccagatgaaattggtaatcctgtagtaaaacgccgcctgaaggagaaagattgcgaaaaaggctttattttggatggtttcccgcgtacccgccgtcaagcggaatatctggatagttttcttgaatcgcagggccgccagttgacagccgccgtgctgctggaggtccccgaagatgaagttgttgtgcgtctgctgtctcgccgtgtttgtccgaaatgcgggcgtagttttaacatgatttttctgccgccaaaagaagacgagctgtgtgacgattgcggtgtcagtttagtacagcgtttcgatgataaggaagaaacggtccgtatgcgcctgaaagtctaccgtgagaagacccagccggtcattgactattatagtaagaaaggtattctcgcacgcgtagatgggagccaagaaatcatgcctatcgtggcagaagtcctggggattctgggttggagcgataag

SEQ ID NO: 3118 - protein, 231 aa, synthetic construct
  REGION 1..231: note = variant of adenylate kinase from Thermotoga neapolitana
MHHHHHHGGSGMGAYLVLLGPPGAGKGTQGRIISAKTGIPHISTGDILRQIVAKQNDEVASSIKEWMLKGELVPDEIGNPVVKRRLKEKDCEKGFILDGFPRTRRQAEYLDSFLESQGRQLTAAVLLEVPEDEVVVRLLSRRVCPKCGRSFNMIFLPPKEDELCDDCGVSLVQRFDDKEETVRMRLKVYREKTQPVIDYYSKKGILARVDGSQEIMPIVAEVLGILGWSDK

SEQ ID NO: 3119 - DNA, 693 bp, synthetic construct
  misc_feature 1..693: note = variant of adenylate kinase from Thermotoga neapolitana
  source 1..693: mol_type = other DNA
atgcaccatcatcaccatcacgggggctccggcatgggggcatatctggtgttattaggtccgccgggcgcgggaaaaggtacccaaggccgtattatttcggcaaagactggcatcccgcatattagcacgggcgatatcctgcgtcagatcgtcgctaagcaaaacgatgaagttgcgtcgagcattaaagaatggatgctgaaaggtgaactcgttccagatgaaattggtaatcctgtagtaaaacgccgcctgaaggagaaagattgcgaaaaaggctttattttggatggtttcccgcgtaccgcgcgtcaagcggaatatctggatagttttcttgaatcgcagggccgccagttgacagccgccgtgctgctggaggtccccgaagatgaagttgttgtgcgtctgctgtctcgccgtgtttgtccgaaatgcgggcgtagttttaacatgatttttctgccgccaaaagaagacgagctgtgtgacgattgcggtgtcagtttagtacagcgtttcgatgataaggaagaaacggtccgtatgcgcctgaaagtctaccaggagaagacccagccggtcattgactattatagtaagaaaggtattctcgcacgcgtagatgggagccaagaaatcatgcctatcgtggcagaagtcctggggattctgggttggagcgataag

SEQ ID NO: 3120 - protein, 231 aa, synthetic construct
  REGION 1..231: note = variant of adenylate kinase from Thermotoga neapolitana
MHHHHHHGGSGMGAYLVLLGPPGAGKGTQGRIISAKTGIPHISTGDILRQIVAKQNDEVASSIKEWMLKGELVPDEIGNPVVKRRLKEKDCEKGFILDGFPRTARQAEYLDSFLESQGRQLTAAVLLEVPEDEVVVRLLSRRVCPKCGRSFNMIFLPPKEDELCDDCGVSLVQRFDDKEETVRMRLKVYQEKTQPVIDYYSKKGILARVDGSQEIMPIVAEVLGILGWSDK

SEQ ID NO: 3121 - DNA, 693 bp, synthetic construct
  misc_feature 1..693: note = variant of adenylate kinase from Thermotoga neapolitana
  source 1..693: mol_type = other DNA
atgcaccatcatcaccatcacgggggctccggcatgggggcatatctggtgttattaggtccgccgggcgcgggaaaaggtacccaaggccgtattatttcggcaaagactggcatcccgcatattagcacgggcgatatcctgcgtcagatcgtcgctaagcaaaacgatgaagttgcctcgagcattaaagaatggatgctgaaaggtgaactcgttccagatgaaattggtaatcctgtagtaaaacgccgcctgaaggagaaagattgcgaaaaaggctttattttggatggtttcccgcgtaccgcgcgtcaagcggaatatctggatagttttcttgaatcgcagggccgccagttgacagccgccgtgctgctggaggtccccgaagatgaagttgttgtgcgtctgctgtctcgccgtgtttgtccgaaatgcgggcgtagttttaacatgatttttctgccgccaaaagaagacgagctgtgtgacgattgcggtgtcagtttagtacagcgtttcgatgataaggaagaaacggtccggatgcgcctgaaagtctaccgtgagaagacccagccggtcattgactattatagtaagaaaggtattctcgcacgcgtagatgggagccaagaaatcatgcctatcgtggcagaagtcctggggattctgggtgtgagcgataag

SEQ ID NO: 3122 - protein, 231 aa, synthetic construct
  REGION 1..231: note = variant of adenylate kinase from Thermotoga neapolitana
MHHHHHHGGSGMGAYLVLLGPPGAGKGTQGRIISAKTGIPHISTGDILRQIVAKQNDEVASSIKEWMLKGELVPDEIGNPVVKRRLKEKDCEKGFILDGFPRTARQAEYLDSFLESQGRQLTAAVLLEVPEDEVVVRLLSRRVCPKCGRSFNMIFLPPKEDELCDDCGVSLVQRFDDKEETVRMRLKVYREKTQPVIDYYSKKGILARVDGSQEIMPIVAEVLGILGVSDK

SEQ ID NO: 3123 - DNA, 693 bp, synthetic construct
  misc_feature 1..693: note = variant of adenylate kinase from Thermotoga neapolitana
  source 1..693: mol_type = other DNA
atgcaccatcatcaccatcacgggggctccggcatgggggcatatctggtgttattaggtccgccgggcgcgggaaaaggtacccaaggccgtattatttcggcaaagactggcatcccgcatattagcacgggcgatatcctgcgtcagatcgtcgctaagcaaaacgatgaagttgcctcgagcattaaagaatggatgctgaaaggtgaactcgttccagatgaaattggtaatcctgtagtaaaacgccgcctgaaggagaaagattgcgaaaaaggctttattttggatggtttcccgcgtaccgcgcgtcaagcggaatatctggatagttttcttgaatcgcagggccgccagttgacagccgccgtgctgctggaggtccccgaagatgaagttgttgtgcgtctgctgtctcgccgtgtttgtccgaaatgcgggcgtagttttaacatgatttttctgccgccaaaagaagacgagctgtgtgacgattgcggtgtcagtttagtaacccgtttcgatgataaggaagaaacggtccgtatgcgcctgaaagtctaccaggagaagacccagccggtcattgactattattcgaagaaaggtattctcgcacgcgtagatgggagccaagaaatcgaacctatcgtggcagaagtcctggggattctgggttggagcgataag

SEQ ID NO: 3124 - protein, 231 aa, synthetic construct
  REGION 1..231: note = variant of adenylate kinase from Thermotoga neapolitana
MHHHHHHGGSGMGAYLVLLGPPGAGKGTQGRIISAKTGIPHISTGDILRQIVAKQNDEVASSIKEWMLKGELVPDEIGNPVVKRRLKEKDCEKGFILDGFPRTARQAEYLDSFLESQGRQLTAAVLLEVPEDEVVVRLLSRRVCPKCGRSFNMIFLPPKEDELCDDCGVSLVTRFDDKEETVRMRLKVYQEKTQPVIDYYSKKGILARVDGSQEIEPIVAEVLGILGWSDK

SEQ ID NO: 3125 - DNA, 693 bp, synthetic construct
  misc_feature 1..693: note = variant of adenylate kinase from Thermotoga neapolitana
  source 1..693: mol_type = other DNA
atgcaccatcatcaccatcacgggggctccggcatgggggcatatctggtgttattaggtccgccgggcgcgggaaaaggtacccaaggccgtattatttcggcaaagactggcatcccgcatattagcacgggcgatatcctgcgtcagatcgtcgctaagcaaaacgatgaagttgcgtcgagcattaaagaatggatgctgaaaggtgaactcgttccagatgaaattggtaatcctgtagtactgcgccgcctgaaggagaaagattgcgaaaaaggctttattttggatggtttcccgcgtaccgcgcgtcaagcggaatatctggatagttttcttgaatcgcagggccgccagttgacagccgccgtgctgctggaggtccccgaagatgaagttgttgtgcgtctgctgtctcgccgtgtttgtccgaaatgcgggcgtagttttaacatgatttttctggtgccaaaagaagacgagctgtgtgacgattgcggtgtcagtttagtagtgcgtttcgatgataaggaagaaacggtccgtatgcgcctgaaagtctaccaggagaagacccagccggtcattgactattatagtaagaaaggtattctcgcacgcgtagatgggagccaagaaatcatgcctatcgtggcagaagtcctggggattctgggttggagcgataag

SEQ ID NO: 3126 - protein, 231 aa, synthetic construct
  REGION 1..231: note = variant of adenylate kinase from Thermotoga neapolitana
MHHHHHHGGSGMGAYLVLLGPPGAGKGTQGRIISAKTGIPHISTGDILRQIVAKQNDEVASSIKEWMLKGELVPDEIGNPVVLRRLKEKDCEKGFILDGFPRTARQAEYLDSFLESQGRQLTAAVLLEVPEDEVVVRLLSRRVCPKCGRSFNMIFLVPKEDELCDDCGVSLVVRFDDKEETVRMRLKVYQEKTQPVIDYYSKKGILARVDGSQEIMPIVAEVLGILGWSDK

SEQ ID NO: 3127 - DNA, 693 bp, synthetic construct
  misc_feature 1..693: note = variant of adenylate kinase from Thermotoga neapolitana
  source 1..693: mol_type = other DNA
atgcaccatcatcaccatcacgggggctccggcatgggggcatatctggtgttattaggtccgccgggcgcgggaaaaggtacccaaggccgtattatttcggcaaagactggcatcccgcatattagcacgggcgatatcctgcgtcagatcgtcgctaagcaaaacgatgaagttgcctcgagcattaaagaatggatgctgaaaggtgaactcgttccagatgaaattggtaatcctgtagtactgcgccgcctgaaggagaaagattgcgaaaaaggctttattttggatggtttcccgcgtaccgcgcgtcaagcggaatatctggatagttttcttgaatcgcagggccgccagttgacagccgccgtgctgctggaggtccccgaagatgaagttgttgtgcgtctgctgtctcgccgtgtttgtccgaaatgcgggcgtagttttaacatgatttttctggtgccaaaagaagacgagctgtgtgacgattgcggtgtcagtttagtaacccgtttcgatgataaggaagaaacggtccgtatgcgcctgaaagtctaccgggagaagacccagccggtcattgactattatgcgaagaaaggtattctcgcacgcgtagatgggagccaagaaatcatgcctatcgtggcagaagtcctggggattctgggttggagcgataag

SEQ ID NO: 3128 - protein, 231 aa, synthetic construct
  REGION 1..231: note = variant of adenylate kinase from Thermotoga neapolitana
MHHHHHHGGSGMGAYLVLLGPPGAGKGTQGRIISAKTGIPHISTGDILRQIVAKQNDEVASSIKEWMLKGELVPDEIGNPVVLRRLKEKDCEKGFILDGFPRTARQAEYLDSFLESQGRQLTAAVLLEVPEDEVVVRLLSRRVCPKCGRSFNMIFLVPKEDELCDDCGVSLVTRFDDKEETVRMRLKVYREKTQPVIDYYAKKGILARVDGSQEIMPIVAEVLGILGWSDK

SEQ ID NO: 3129 - DNA, 693 bp, synthetic construct
  misc_feature 1..693: note = variant of adenylate kinase from Thermotoga neapolitana
  source 1..693: mol_type = other DNA
atgcaccatcatcaccatcacgggggctccggcatgggggcatatctggtgttattaggtccgccgggcgcgggaaaaggtacccaaggccgtattatttcggcaaagactggcatcccgcatattagcacgggcgatatcctgcgtcagatcgtcgctaagcaaaacgatgaagttgcctcgagcattaaagaatggatgctgaaaggtgaactcgttccagatgaaattggttggcctgtagtaaaacgccgcctgaaggagaaagattgcgaaaaaggctttattttggatggtttcccgcgtaccgcgcgtcaagcggaatatctggatagttttcttgaatcgcagggccgccagttgacagccgccgtgctgctggaggtccccgaagatgaagttgttgtgcgtctgctgtctcgccgtgtttgtccgaaatgcgggcgtagttttaacatgatttttctgccgccaaaagaagacgagctgtgtgacgattgcggtgtcagtttagtacagcgtttcgatgataaggaagaaacggtccggatgcgcctgaaagtctaccgtgagaagacccagccggtcattgactattatagtaagaaaggtattctcgcacgcgtagatgggagccaagaaatcatgcctatcgtggcagaagtcctggggattctgggtgtgatcgataag

SEQ ID NO: 3130 - protein, 231 aa, synthetic construct
  REGION 1..231: note = variant of adenylate kinase from Thermotoga neapolitana
MHHHHHHGGSGMGAYLVLLGPPGAGKGTQGRIISAKTGIPHISTGDILRQIVAKQNDEVASSIKEWMLKGELVPDEIGWPVVKRRLKEKDCEKGFILDGFPRTARQAEYLDSFLESQGRQLTAAVLLEVPEDEVVVRLLSRRVCPKCGRSFNMIFLPPKEDELCDDCGVSLVQRFDDKEETVRMRLKVYREKTQPVIDYYSKKGILARVDGSQEIMPIVAEVLGILGVIDK

SEQ ID NO: 3131 - DNA, 693 bp, synthetic construct
  misc_feature 1..693: note = variant of adenylate kinase from Thermotoga neapolitana
  source 1..693: mol_type = other DNA
atgcaccatcatcaccatcacgggggctccggcatgggggcatatctggtgttattaggtccgccgggcgcgggaaaaggtacccaaggccgtattatttcggcaaagactggcatcccgcatattagcacgggcgatatcctgcgtcagatcgtcgctaagcaaaacgatgaagttgcgtcgagcattaaagaatggatgctgaaaggtgaactcgttccagatgaaattggtaatcctgtagtactgcgccgcctgaaggagaaagattgcgaaaaaggctttattttggatggtttcccgcgtaccgcgcgtcaagcggaatatctggatagttatcttgaatcgcagggccgccagttgacagccgccgtgctgctggaggtccccgaagatgaagttgttgtgcgtctgctgtctcgccgtgtttgtccgaaatgcgggcgtagttttaacatgatttttctggtgccaaaagaagacgagctgtgtgacgattgcggtgtcagtttagtacagcgtttcgatgataaggaagaaacggtccgtatgcgcctgaaagtctaccgtgagaagacccagccggtcattgactattatagtaagaaaggtattctcgcacgcgtagatgggagccaagaaatcatgcctatcgtggcagaagtcctggggattctgggttggagcgataag

SEQ ID NO: 3132 - protein, 231 aa, synthetic construct
  REGION 1..231: note = variant of adenylate kinase from Thermotoga neapolitana
MHHHHHHGGSGMGAYLVLLGPPGAGKGTQGRIISAKTGIPHISTGDILRQIVAKQNDEVASSIKEWMLKGELVPDEIGNPVVLRRLKEKDCEKGFILDGFPRTARQAEYLDSYLESQGRQLTAAVLLEVPEDEVVVRLLSRRVCPKCGRSFNMIFLVPKEDELCDDCGVSLVQRFDDKEETVRMRLKVYREKTQPVIDYYSKKGILARVDGSQEIMPIVAEVLGILGWSDK

SEQ ID NO: 3133 - DNA, 693 bp, synthetic construct
  misc_feature 1..693: note = variant of adenylate kinase from Thermotoga neapolitana
  source 1..693: mol_type = other DNA
atgcaccatcatcaccatcacgggggctccggcatgggggcatatctggtgttattaggtccgccgggcgcgggaaaaggtacccaaggccgtattatttcggcaaagactggcatcccgcatattagcacgggcgatatcctgcgtcagatcgtcgctaagcaaaacgatgaagttgcctcgagcattaaagaatggatgctgaaaggtgaactcgttccagatgaaattggtaatcctgtagtaaaacgccgcctgaaggagaaagattgcgaaaaaggctttattttggatggtttcccgcgtaccgcgcgtcaagcggaatatctggatagttttcttgaatcgcagggccgccagttgacagccgccgtgctgctggaggtccccgaagatgaagttgttgtgcgtctgctgtctcgccgtgtttgtccgaaatgcgggcgtagttttaacatgatttttctggtgccaaaagaagacgagctgtgtgacgattgcggtgtcagtttagtacagcgtttcgatgataaggaagaaacggtccgtatgcgcctgaaagtctaccgtgagaagacccagccggtcattgactattattttaagaaaggtattctcgcacgcgtagatgggagccaagaaatcgaacctatcgtggcagaagtcctggggattctgggttggagcgataag

SEQ ID NO: 3134 - protein, 231 aa, synthetic construct
  REGION 1..231: note = variant of adenylate kinase from Thermotoga neapolitana
MHHHHHHGGSGMGAYLVLLGPPGAGKGTQGRIISAKTGIPHISTGDILRQIVAKQNDEVASSIKEWMLKGELVPDEIGNPVVKRRLKEKDCEKGFILDGFPRTARQAEYLDSFLESQGRQLTAAVLLEVPEDEVVVRLLSRRVCPKCGRSFNMIFLVPKEDELCDDCGVSLVQRFDDKEETVRMRLKVYREKTQPVIDYYFKKGILARVDGSQEIEPIVAEVLGILGWSDK

SEQ ID NO: 3135 - DNA, 693 bp, synthetic construct
  misc_feature 1..693: note = variant of adenylate kinase from Thermotoga neapolitana
  source 1..693: mol_type = other DNA
atgcaccatcatcaccatcacgggggctccggcatgggggcatatctggtgttattaggtccgccgggcgcgggaaaaggtacccaaggccgtattatttcggcaaagactggcatcccgcatattagcacgggcgatatcctgcgtcagatcgtcgctaagcaaaacgatgaagttgcgtcgagcattaaagaatggatgctgaaaggtgaactcgttccagatgaaattggtaatcctgtagtactgcgccgcctgaaggagaaagactgcgaaaaaggctttattttggatggtttcccgcgtacccgccgtcaagcggaatatctggatagttttcttgaatcgcagggccgccagttgacagccgccgtgctgctggaggtccccgaagatgaagttgttgtgcgtctgctgtctcgccgtgtttgtccgaaatgcgggcgtagttttaacatgatttttctggtgccaaaagaagacgagctgtgtgacgattgcggtgtcagtttagtacagcgtttcgatgataaggaagaaacggtccgtatgcgcctgaaagtctaccgtgagaagacccagccggtcattgactattattcgaagaaaggtattctcgcacgcgtagatgggagccaagaaatcatgcctatcgtggcagaagtcctggggattctgggttggagcgataag

SEQ ID NO: 3136 - protein, 231 aa, synthetic construct
  REGION 1..231: note = variant of adenylate kinase from Thermotoga neapolitana
MHHHHHHGGSGMGAYLVLLGPPGAGKGTQGRIISAKTGIPHISTGDILRQIVAKQNDEVASSIKEWMLKGELVPDEIGNPVVLRRLKEKDCEKGFILDGFPRTRRQAEYLDSFLESQGRQLTAAVLLEVPEDEVVVRLLSRRVCPKCGRSFNMIFLVPKEDELCDDCGVSLVQRFDDKEETVRMRLKVYREKTQPVIDYYSKKGILARVDGSQEIMPIVAEVLGILGWSDK

SEQ ID NO: 3137 - DNA, 693 bp, synthetic construct
  misc_feature 1..693: note = variant of adenylate kinase from Thermotoga neapolitana
  source 1..693: mol_type = other DNA
atgcaccatcatcaccatcacgggggctccggcatgggggcatatctggtgttattaggtccgccgggcgcgggaaaaggtacccaaggccgtattatttcggcaaagactggcatcccgcatattagcacgggcgatatcctgcgtcagatcgtcgctaagcaaaacgatgaagttgcctcgagcattaaagaatggatgctgaaaggtgaactcgttccagatgaaattggttggcctgtagtaaaacgccgcctgaaggagaaagattgcgaaaaaggctttattttggatggtttcccgcgtaccgcgcgtcaagcggaatatctggatagttttcttgaatcgcagggccgccagttgacagccgccgtgctgctggaggtccccgaagatgaagttgttgtgcgtctgctgtctcgccgtgtttgtccgaaatgcgggcgtagttttaacatgatttttctgccgccaaaagaagacgagctgtgtgacgattgcggtgtcagtttagtacagcgtttcgatgataaggaagaaacggtccgtatgcgcctgaaagtctaccgtgagaagacccagccggtcattgactattatagtaagaaaggtattctcgcacgcgtagatgggagccaagaaatcatgcctatcgtggcagaagtcctggggattctgggttggatcgataag

SEQ ID NO: 3138 - protein, 231 aa, synthetic construct
  REGION 1..231: note = variant of adenylate kinase from Thermotoga neapolitana
MHHHHHHGGSGMGAYLVLLGPPGAGKGTQGRIISAKTGIPHISTGDILRQIVAKQNDEVASSIKEWMLKGELVPDEIGWPVVKRRLKEKDCEKGFILDGFPRTARQAEYLDSFLESQGRQLTAAVLLEVPEDEVVVRLLSRRVCPKCGRSFNMIFLPPKEDELCDDCGVSLVQRFDDKEETVRMRLKVYREKTQPVIDYYSKKGILARVDGSQEIMPIVAEVLGILGWIDK

SEQ ID NO: 3139 - DNA, 693 bp, synthetic construct
  misc_feature 1..693: note = variant of adenylate kinase from Thermotoga neapolitana
  source 1..693: mol_type = other DNA
atgcaccatcatcaccatcacgggggctccggcatgggggcatatctggtgttattaggtccgccgggcgcgggaaaaggtacccaaggccgtattatttcggcaaagactggcatcccgcatattagcacgggcgatatcctgcgtcagatcgtcgctaagcaaaacgatgaagttgcctcgagcattaaagaatggatgctgaaaggtgaactcgttccagatgaaattggtaatcctgtagtaaaacgccgcctgaaggagaaagattgcgaaaaaggctttattttggatggtttcccgcgtaccgcgcgtcaagcggaatatctggatagttttcttgaatcgcagggccgccagttgacagccgccgtgctgctggaggtccccgaagatgaagttgttgtgcgtctgctgtctcgccgtgtttgtccgaaatgcgggcgtagttttaacatgatttttctgccgccaaaagaagacgagctgtgtgacgattgcggtgtcagtttagtacagcgtttcgatgataaggaagaaacggtccgtatgcgcctgaaagtctaccgtgagaagacccagccggtcattgactattatagtaagaaaggtattctcgcacgcgtagatgggagccaagaaatcatgcctatcgtggcagaagtcctggggattctgggttggagcgataag

SEQ ID NO: 3140 - protein, 231 aa, synthetic construct
  REGION 1..231: note = variant of adenylate kinase from Thermotoga neapolitana
MHHHHHHGGSGMGAYLVLLGPPGAGKGTQGRIISAKTGIPHISTGDILRQIVAKQNDEVASSIKEWMLKGELVPDEIGNPVVKRRLKEKDCEKGFILDGFPRTARQAEYLDSFLESQGRQLTAAVLLEVPEDEVVVRLLSRRVCPKCGRSFNMIFLPPKEDELCDDCGVSLVQRFDDKEETVRMRLKVYREKTQPVIDYYSKKGILARVDGSQEIMPIVAEVLGILGWSDK

SEQ ID NO: 3141 - DNA, 693 bp, synthetic construct
  misc_feature 1..693: note = variant of adenylate kinase from Thermotoga neapolitana
  source 1..693: mol_type = other DNA
atgcaccatcatcaccatcacgggggctccggcatgggggcatatctggtgttattaggtccgccgggcgcgggaaaaggtacccaaggccgtattatttcggcaaagactggcatcccgcatattagcacgggcgatatcctgcgtcagatcgtcgctaagcaaaacgatgaagttgcgtcgagcattaaagaatggatgctgaaaggtgaactcgttccagatgaaattggtaatcctgtagtaaaacgccgcctgaaggagaaagattgcgaaaaaggctttattttggatggtttcccgcgtaccgcgcgtcaagcggaatatctggatagttttcttgaatcgcagggccgccagttgacagccgccgtgctgctggaggtccccgaagatgaagttgttgtgcgtctgctgtctcgccgtgtttgtccgaaatgcgggcgtagttttaacatgatttttctggtgccaaaagaagacgagctgtgtgacgattgcggtgtcagtttagtaacccgtttcgatgataaggaagaaacggtccgtatgcgcctgaaagtctaccgggagaagacccagccggtcattgactattatagtaagaaaggtattctcgcacgcgtagatgggagccaagaaatcgaacctatcgtggcagaagtcctggggattctgggttggagcgataag

SEQ ID NO: 3142 - protein, 231 aa, synthetic construct
  REGION 1..231: note = variant of adenylate kinase from Thermotoga neapolitana
MHHHHHHGGSGMGAYLVLLGPPGAGKGTQGRIISAKTGIPHISTGDILRQIVAKQNDEVASSIKEWMLKGELVPDEIGNPVVKRRLKEKDCEKGFILDGFPRTARQAEYLDSFLESQGRQLTAAVLLEVPEDEVVVRLLSRRVCPKCGRSFNMIFLVPKEDELCDDCGVSLVTRFDDKEETVRMRLKVYREKTQPVIDYYSKKGILARVDGSQEIEPIVAEVLGILGWSDK

SEQ ID NO: 3143 - DNA, 693 bp, synthetic construct
  misc_feature 1..693: note = variant of adenylate kinase from Thermotoga neapolitana
  source 1..693: mol_type = other DNA
atgcaccatcatcaccatcacgggggctccggcatgggggcatatctggtgttattaggtccgccgggcgcgggaaaaggtacccaaggccgtattatttcggcaaagactggcatcccgcatattagcacgggcgatatcctgcgtcagatcgtcgctaagcaaaacgatgaagttgcgtcgagcattaaagaatggatgctgaaaggtgaactcgttccagatgaaattggtaatcctgtagtactgcgccgcctgaaggagaaagattgcgaaaaaggctttattttggatggtttcccgcgtaccgcgcgtcaagcggaatatctggatagttttcttgaatcgcagggccgccagttgacagccgccgtgctgctggaggtccccgaagatgaagttgttgtgcgtctgctgtctcgccgtgtttgtccgaaatgcgggcgtagttttaacatgatttttctggtgccaaaagaagacgagctgtgtgacgattgcggtgtcagtttagtagtgcgtttcgatgataaggaagaaacggtccgtatgcgcctgaaagtctaccaggagaagacccagccggtcattgactattattttaagaaaggtattctcgcacgcgtagatgggagccaagaaatcatgcctatcgtggcagaagtcctggggattctgggttggagcgataag

SEQ ID NO: 3144 - protein, 231 aa, synthetic construct
  REGION 1..231: note = variant of adenylate kinase from Thermotoga neapolitana
MHHHHHHGGSGMGAYLVLLGPPGAGKGTQGRIISAKTGIPHISTGDILRQIVAKQNDEVASSIKEWMLKGELVPDEIGNPVVLRRLKEKDCEKGFILDGFPRTARQAEYLDSFLESQGRQLTAAVLLEVPEDEVVVRLLSRRVCPKCGRSFNMIFLVPKEDELCDDCGVSLVVRFDDKEETVRMRLKVYQEKTQPVIDYYFKKGILARVDGSQEIMPIVAEVLGILGWSDK

SEQ ID NO: 3145 - DNA, 693 bp, synthetic construct
  misc_feature 1..693: note = variant of adenylate kinase from Thermotoga neapolitana
  source 1..693: mol_type = other DNA
atgcaccatcatcaccatcacgggggctccggcatgggggcatatctggtgttattaggtccgccgggcgcgggaaaaggtacccaaggccgtattatttcggcaaagactggcatcccgcatattagcacgggcgatatcctgcgtcagatcgtcgctaagcaaaacgatgaagttgcctcgagcattaaagaatggatgctgaaaggtgaactcgttccagatgaaattggtaatcctgtagtaaaacgccgcctgaaggagaaagattgcgaaaaaggctttattttggatggtttcccgcgtaccgcgcgtcaagcggaatatctggatagttttcttgaatcgcagggccgccagttgacagccgccgtgctgctggaggtccccgaagatgaagttgttgtgcgtctgctgtctcgccgtgtttgtccgaaatgcgggcgtagttttaacatgatttttctgccgccaaaagaagacgagctgtgtgacgattgcggtgtcagtttagtacagcgtttcgatgataaggaagaaacggtcctgatgcgcctgaaagtctaccgtgagaagacccagccggtcattgactattatagtaagaaaggtattctcgcacgcgtagatgggagccaagaaatcatgcctatcgtggcagaagtcctggggattctgggttggagcgataag

SEQ ID NO: 3146 - protein, 231 aa, synthetic construct
  REGION 1..231: note = variant of adenylate kinase from Thermotoga neapolitana
MHHHHHHGGSGMGAYLVLLGPPGAGKGTQGRIISAKTGIPHISTGDILRQIVAKQNDEVASSIKEWMLKGELVPDEIGNPVVKRRLKEKDCEKGFILDGFPRTARQAEYLDSFLESQGRQLTAAVLLEVPEDEVVVRLLSRRVCPKCGRSFNMIFLPPKEDELCDDCGVSLVQRFDDKEETVLMRLKVYREKTQPVIDYYSKKGILARVDGSQEIMPIVAEVLGILGWSDK

SEQ ID NO: 3147 - DNA, 693 bp, synthetic construct
  misc_feature 1..693: note = variant of adenylate kinase from Thermotoga neapolitana
  source 1..693: mol_type = other DNA
atgcaccatcatcaccatcacgggggctccggcatgggggcatatctggtgttattaggtccgccgggcgcgggaaaaggtacccaaggccgtattatttcggcaaagactggcatcccgcatattagcacgggcgatatcctgcgtcagatcgtcgctaagcaaaacgatgaagttgcgtcgagcattaaagaatggatgctgaaaggtgaactcgttccagatgaaattggtaatcctgtagtactgcgccgcctgaaggagaaagattgcgaaaaaggctttattttggatggtttcccgcgtaccgcgcgtcaagcggaatatctggatagttttcttgaatcgcagggccgccagttgacagccgccgtgctgctggaggtccccgaagatgaagttgttgtgcgtctgctgtctcgccgtgtttgtccgaaatgcgggcgtagttttaacatgatttttctggtgccaaaagaagacgagctgtgtgacgattgcggtgtcagtttagtacagcgtttcgatgataaggaagaaacggtccgtatgcgcctgaaagtctaccaggagaagacccagccggtcattgactattatagtaagaaaggtattctcgcacgcgtagatgggagccaagaaatcatgcctatcgtggcagaagtcctggggattctgggttggagcgataag

SEQ ID NO: 3148 - protein, 231 aa, synthetic construct
  REGION 1..231: note = variant of adenylate kinase from Thermotoga neapolitana
MHHHHHHGGSGMGAYLVLLGPPGAGKGTQGRIISAKTGIPHISTGDILRQIVAKQNDEVASSIKEWMLKGELVPDEIGNPVVLRRLKEKDCEKGFILDGFPRTARQAEYLDSFLESQGRQLTAAVLLEVPEDEVVVRLLSRRVCPKCGRSFNMIFLVPKEDELCDDCGVSLVQRFDDKEETVRMRLKVYQEKTQPVIDYYSKKGILARVDGSQEIMPIVAEVLGILGWSDK

SEQ ID NO: 3149 - DNA, 693 bp, synthetic construct
  misc_feature 1..693: note = variant of adenylate kinase from Thermotoga neapolitana
  source 1..693: mol_type = other DNA
atgcaccatcatcaccatcacgggggctccggcatgggggcatatctggtgttattaggtccgccgggcgcgggaaaaggtacccaaggccgtattatttcggcaaagactggcatcccgcatattagcacgggcgatatcctgcgtcagatcgtcgctaagcaaaacgatgaagttgcctcgagcattaaagaatggatgctgaaaggtgaactcgttccagatgaaattggttggcctgtagtaaaacgccgcctgaaggagaaagactgcgaaaaaggctttattttggatggtttcccgcgtacccgccgtcaagcggaatatctggatagttttcttgaatcgcagggccgccagttgacagccgccgtgctgctggaggtccccgaagatgaagttgttgtgcgtctgctgtctcgccgtgtttgtccgaaatgcgggcgtagttttaacatgatttttctgccgccaaaagaagacgagctgtgtgacgattgcggtgtcagtttagtacagcgtttcgatgataaggaagaaacggtccgtatgcgcctgaaagtctaccgtgagaagacccagccggtcattgactattatagtaagaaaggtattctcgcacgcgtagatgggagccaagaaatcatgcctatcgtggcagaagtcctggggattctgggtgtgagcgataag

SEQ ID NO: 3150 - protein, 231 aa, synthetic construct
  REGION 1..231: note = variant of adenylate kinase from Thermotoga neapolitana
MHHHHHHGGSGMGAYLVLLGPPGAGKGTQGRIISAKTGIPHISTGDILRQIVAKQNDEVASSIKEWMLKGELVPDEIGWPVVKRRLKEKDCEKGFILDGFPRTRRQAEYLDSFLESQGRQLTAAVLLEVPEDEVVVRLLSRRVCPKCGRSFNMIFLPPKEDELCDDCGVSLVQRFDDKEETVRMRLKVYREKTQPVIDYYSKKGILARVDGSQEIMPIVAEVLGILGVSDK

SEQ ID NO: 3151 - DNA, 693 bp, synthetic construct
  misc_feature 1..693: note = variant of adenylate kinase from Thermotoga neapolitana
  source 1..693: mol_type = other DNA
atgcaccatcatcaccatcacgggggctccggcatgggggcatatctggtgttattaggtccgccgggcgcgggaaaaggtacccaaggccgtattatttcggcaaagactggcatcccgcatattagcacgggcgatatcctgcgtcagatcgtcgctaagcaaaacgatgaagttgcgtcgagcattaaagaatggatgctgaaaggtgaactcgttccagatgaaattggtaatcctgtagtactgcgccgcctgaaggagaaagattgcgaaaaaggctttattttggatggtttcccgcgtacccgccgtcaagcggaatatctggatagttttcttgaatcgcagggccgccagttgacagccgccgtgctgctggaggtccccgaagatgaagttgttgtgcgtctgctgtctcgccgtgtttgtccgaaatgcgggcgtagttttaacatgatttttctgccgccaaaagaagacgagctgtgtgacgattgcggtgtcagtttagtacagcgtttcgatgataaggaagaaacggtccgtatgcgcctgaaagtctaccaggagaagacccagccggtcattgactattatgcgaagaaaggtattctcgcacgcgtagatgggagccaagaaatcgaacctatcgtggcagaagtcctggggattctgggtgtgatcgataag

SEQ ID NO: 3152 - protein, 231 aa, synthetic construct
  REGION 1..231: note = variant of adenylate kinase from Thermotoga neapolitana
MHHHHHHGGSGMGAYLVLLGPPGAGKGTQGRIISAKTGIPHISTGDILRQIVAKQNDEVASSIKEWMLKGELVPDEIGNPVVLRRLKEKDCEKGFILDGFPRTRRQAEYLDSFLESQGRQLTAAVLLEVPEDEVVVRLLSRRVCPKCGRSFNMIFLPPKEDELCDDCGVSLVQRFDDKEETVRMRLKVYQEKTQPVIDYYAKKGILARVDGSQEIEPIVAEVLGILGVIDK

SEQ ID NO: 3153 - DNA, 693 bp, synthetic construct
  misc_feature 1..693: note = variant of adenylate kinase from Thermotoga neapolitana
  source 1..693: mol_type = other DNA
atgcaccatcatcaccatcacgggggctccggcatgggggcatatctggtgttattaggtccgccgggcgcgggaaaaggtacccaaggccgtattatttcggcaaagactggcatcccgcatattagcacgggcgatatcctgcgtcagatcgtcgctaagcaaaacgatgaagttgcgtcgagcattaaagaatggatgctgaaaggtgaactcgttccagatgaaattggtaatcctgtagtactgcgccgcctgaaggagaaagattgcgaaaaaggctttattttggatggtttcccgcgtacccgccgtcaagcggaatatctggatagttttcttgaatcgcagggccgccagttgacagccgccgtgctgctggaggtccccgaagatgaagttgttgtgcgtctgctgtctcgccgtgtttgtccgaaatgcgggcgtagttttaacatgatttttctggtgccaaaagaagacgagctgtgtgacgattgcggtgtcagtttagtacagcgtttcgatgataaggaagaaacggtccgtatgcgcctgaaagtctaccaggagaagacccagccggtcattgactattatgcgaagaaaggtattctcgcacgcgtagatgggagccaagaaatcgaacctatcgtggcagaagtcctggggattctgggttggagcgataag

SEQ ID NO: 3154 - protein, 231 aa, synthetic construct
  REGION 1..231: note = variant of adenylate kinase from Thermotoga neapolitana
MHHHHHHGGSGMGAYLVLLGPPGAGKGTQGRIISAKTGIPHISTGDILRQIVAKQNDEVASSIKEWMLKGELVPDEIGNPVVLRRLKEKDCEKGFILDGFPRTRRQAEYLDSFLESQGRQLTAAVLLEVPEDEVVVRLLSRRVCPKCGRSFNMIFLVPKEDELCDDCGVSLVQRFDDKEETVRMRLKVYQEKTQPVIDYYAKKGILARVDGSQEIEPIVAEVLGILGWSDK

SEQ ID NO: 3155 - DNA, 693 bp, synthetic construct
  misc_feature 1..693: note = variant of adenylate kinase from Thermotoga neapolitana
  source 1..693: mol_type = other DNA
atgcaccatcatcaccatcacgggggctccggcatgggggcatatctggtgttattaggtccgccgggcgcgggaaaaggtacccaaggccgtattatttcggcaaagactggcatcccgcatattagcacgggcgatatcctgcgtcagatcgtcgctaagcaaaacgatgaagttgcgtcgagcattaaagaatggatgctgaaaggtgaactcgttccagatgaaattggtaatcctgtagtactgcgccgcctgaaggagaaagattgcgaaaaaggctttattttggatggtttcccgcgtacccgccgtcaagcggaatatctggatagttttcttgaatcgcagggccgccagttgacagccgccgtgctgctggaggtccccgaagatgaagttgttgtgcgtctgctgtctcgccgtgtttgtccgaaatgcgggcgtagttttaacatgatttttctgccgccaaaagaagacgagctgtgtgacgattgcggtgtctcgttagtacagcgtttcgatgataaggaagaaacggtccgtatgcgcctgaaagtctaccaggagaagacccagccggtcattgactattatgcgaagaaaggtattctcgcacgcgtagatgggagccaagaaatcgaacctatcgtggcagaagtcctggggattctgggttggatcgataag

SEQ ID NO: 3156 - protein, 231 aa, synthetic construct
  REGION 1..231: note = variant of adenylate kinase from Thermotoga neapolitana
MHHHHHHGGSGMGAYLVLLGPPGAGKGTQGRIISAKTGIPHISTGDILRQIVAKQNDEVASSIKEWMLKGELVPDEIGNPVVLRRLKEKDCEKGFILDGFPRTRRQAEYLDSFLESQGRQLTAAVLLEVPEDEVVVRLLSRRVCPKCGRSFNMIFLPPKEDELCDDCGVSLVQRFDDKEETVRMRLKVYQEKTQPVIDYYAKKGILARVDGSQEIEPIVAEVLGILGWIDK

SEQ ID NO: 3157 - DNA, 693 bp, synthetic construct
  misc_feature 1..693: note = variant of adenylate kinase from Thermotoga neapolitana
  source 1..693: mol_type = other DNA
atgcaccatcatcaccatcacgggggctccggcatgggggcatatctggtgttattaggtccgccgggcgcgggaaaaggtacccaaggccgtattatttcggcaaagactggcatcccgcatattagcacgggcgatatcctgcgtcagatcgtcgctaagcaaaacgatgaagttgcgtcgagcattaaagaatggatgctgaaaggtgaactcgttccagatgaaattggtaatcctgtagtactgcgccgcctgaaggagaaagattgcgaaaaaggctttattttggatggtttcccgcgtaccgcgcgtcaagcggaatatctggatagttttcttgaatcgcagggccgccagttgacagccgccgtgctgctggaggtccccgaagatgaagttgttgtgcgtctgctgtctcgccgtgtttgtccgaaatgcgggcgtagttttaacatgatttttctgccgccaaaagaagacgagctgtgtgacgattgcggtgtcagtttagtacagcgtttcgatgataaggaagaaacggtccgtatgcgcctgaaagtctaccaggagaagacccagccggtcattgactattatgcgaagaaaggtattctcgcacgcgtagatgggagccaagaaatcgaacctatcgtggcagaagtcctggggattctgggtgtgatcgataag

SEQ ID NO: 3158 - protein, 231 aa, synthetic construct
  REGION 1..231: note = variant of adenylate kinase from Thermotoga neapolitana
MHHHHHHGGSGMGAYLVLLGPPGAGKGTQGRIISAKTGIPHISTGDILRQIVAKQNDEVASSIKEWMLKGELVPDEIGNPVVLRRLKEKDCEKGFILDGFPRTARQAEYLDSFLESQGRQLTAAVLLEVPEDEVVVRLLSRRVCPKCGRSFNMIFLPPKEDELCDDCGVSLVQRFDDKEETVRMRLKVYQEKTQPVIDYYAKKGILARVDGSQEIEPIVAEVLGILGVIDK

SEQ ID NO: 3159 - DNA, 693 bp, synthetic construct
  misc_feature 1..693: note = variant of adenylate kinase from Thermotoga neapolitana
  source 1..693: mol_type = other DNA
atgcaccatcatcaccatcacgggggctccggcatgggggcatatctggtgttattaggtccgccgggcgcgggaaaaggtacccaaggccgtattatttcggcaaagactggcatcccgcatattagcacgggcgatatcctgcgtcagatcgtcgctaagcaaaacgatgaagttgcgtcgagcattaaagaatggatgctgaaaggtgaactcgttccagatgaaattggtaatcctgtagtactgcgccgcctgaaggagaaagattgcgaaaaaggctttattttggatggtttcccgcgtacccgccgtcaagcggaatatctggatagttttcttgaatcgcagggccgccagttgacagccgccgtgctgctggaggtccccgaagatgaagttgttgtgcgtctgctgtctcgccgtgtttgtccgaaatgcgggcgtagttttaacatgatttttctggtgccaaaagaagacgagctgtgtgacgattgcggtgtcccgttagtacagcgtttcgatgataaggaagaaacggtccgtatgcgcctgaaagtctaccgggagaagacccagccggtcattgactattatgcgaagaaaggtattctcgcacgcgtagatgggagccaagaaatcgaacctatcgtggcagaagtcctggggattctgggtgtgagcgataag

SEQ ID NO: 3160 - protein, 231 aa, synthetic construct
  REGION 1..231: note = variant of adenylate kinase from Thermotoga neapolitana
MHHHHHHGGSGMGAYLVLLGPPGAGKGTQGRIISAKTGIPHISTGDILRQIVAKQNDEVASSIKEWMLKGELVPDEIGNPVVLRRLKEKDCEKGFILDGFPRTRRQAEYLDSFLESQGRQLTAAVLLEVPEDEVVVRLLSRRVCPKCGRSFNMIFLVPKEDELCDDCGVPLVQRFDDKEETVRMRLKVYREKTQPVIDYYAKKGILARVDGSQEIEPIVAEVLGILGVSDK

SEQ ID NO: 3161 - DNA, 693 bp, synthetic construct
  misc_feature 1..693: note = variant of adenylate kinase from Thermotoga neapolitana
  source 1..693: mol_type = other DNA
atgcaccatcatcaccatcacgggggctccggcatgggggcatatctggtgttattaggtccgccgggcgcgggaaaaggtacccaaggccgtattatttcggcaaagactggcatcccgcatattagcacgggcgatatcctgcgtcagatcgtcgctaagcaaaacgatgaagttgcgtcgagcattaaagaatggatgctgaaaggtgaactcgttccagatgaaattggtaatcctgtagtactgcgccgcctgaaggagaaagattgcgaaaaaggctttattttggatggtttcccgcgtacccgccgtcaagcggaatatctggatagttttcttgaatcgcagggccgccagttgacagccgccgtgctgctggaggtccccgaagatgaagttgttgtgcgtctgctgtctcgccgtgtttgtccgaaatgcgggcgtagttttaacatgatttttctgccgccaaaagaagacgagctgtgtgacgattgcggtgtcagtttagtacagcgtttcgatgataaggaagaaacggtccgtatgcgcctgaaagtctaccaggagaagacccagccggtcattgactattatgcgaagaaaggtattctcgcacgcgtagatgggagccaagaaatcgaacctatcgtggcagaagtcctggggattctgggttggagcgataag

SEQ ID NO: 3162 - protein, 231 aa, synthetic construct
  REGION 1..231: note = variant of adenylate kinase from Thermotoga neapolitana
MHHHHHHGGSGMGAYLVLLGPPGAGKGTQGRIISAKTGIPHISTGDILRQIVAKQNDEVASSIKEWMLKGELVPDEIGNPVVLRRLKEKDCEKGFILDGFPRTRRQAEYLDSFLESQGRQLTAAVLLEVPEDEVVVRLLSRRVCPKCGRSFNMIFLPPKEDELCDDCGVSLVQRFDDKEETVRMRLKVYQEKTQPVIDYYAKKGILARVDGSQEIEPIVAEVLGILGWSDK

SEQ ID NO: 3163 - DNA, 693 bp, synthetic construct
  misc_feature 1..693: note = variant of adenylate kinase from Thermotoga neapolitana
  source 1..693: mol_type = other DNA
atgcaccatcatcaccatcacgggggctccggcatgggggcatatctggtgttattaggtccgccgggcgcgggaaaaggtacccaaggccgtattatttcggcaaagactggcatcccgcatattagcacgggcgatatcctgcgtcagatcgtcgctaagcaaaacgatgaagttgcgtcgagcattaaagaatggatgctgaaaggtgaactcgttccagatgaaattggtaatcctgtagtactgcgccgcctgaaggagaaagattgcgaaaaaggctttattttggatggtttcccgcgtaccgcgcgtcaagcggaatatctggatagttttcttgaatcgcagggccgccagttgacagccgccgtgctgctggaggtccccgaagatgaagttgttgtgcgtctgctgtctcgccgtgtttgtccgaaatgcgggcgtagttttaacatgatttttctggtgccaaaagaagacgagctgtgtgacgattgcggtgtcagtttagtacagcgtttcgatgataaggaagaaacggtccgtatgcgcctgaaagtctaccgggagaagacccagccggtcattgactattatgcgaagaaaggtattctcgcacgcgtagatgggagccaagaaatcgaacctatcgtggcagaagtcctggggattctgggttggagcgataag

SEQ ID NO: 3164 - protein, 231 aa, synthetic construct
  REGION 1..231: note = variant of adenylate kinase from Thermotoga neapolitana
MHHHHHHGGSGMGAYLVLLGPPGAGKGTQGRIISAKTGIPHISTGDILRQIVAKQNDEVASSIKEWMLKGELVPDEIGNPVVLRRLKEKDCEKGFILDGFPRTARQAEYLDSFLESQGRQLTAAVLLEVPEDEVVVRLLSRRVCPKCGRSFNMIFLVPKEDELCDDCGVSLVQRFDDKEETVRMRLKVYREKTQPVIDYYAKKGILARVDGSQEIEPIVAEVLGILGWSDK

SEQ ID NO: 3165 - DNA, 693 bp, synthetic construct
  misc_feature 1..693: note = variant of adenylate kinase from Thermotoga neapolitana
  source 1..693: mol_type = other DNA
atgcaccatcatcaccatcacgggggctccggcatgggggcatatctggtgttattaggtccgccgggcgcgggaaaaggtacccaaggccgtattatttcggcaaagactggcatcccgcatattagcacgggcgatatcctgcgtcagatcgtcgctaagcaaaacgatgaagttgcgtcgagcattaaagaatggatgctgaaaggtgaactcgttccagatgaaattggtaatcctgtagtactgcgccgcctgaaggagaaagattgcgaaaaaggctttattttggatggtttcccgcgtaccgcgcgtcaagcggaatatctggatagttttcttgaatcgcagggccgccagttgacagccgccgtgctgctggaggtccccgaagatgaagttgttgtgcgtctgctgtctcgccgtgtttgtccgaaatgcgggcgtagttttaacatgatttttctggtgccaaaagaagacgagctgtgtgacgattgcggtgtcagtttagtacagcgtttcgatgataaggaagaaacggtccgtatgcgcctgaaagtctaccaggagaagacccagccggtcattgactattattcgaagaaaggtattctcgcacgcgtagatgggagccaagaaatcgaacctatcgtggcagaagtcctggggattctgggtgtgagcgataag

SEQ ID NO: 3166 - protein, 231 aa, synthetic construct
  REGION 1..231: note = variant of adenylate kinase from Thermotoga neapolitana
MHHHHHHGGSGMGAYLVLLGPPGAGKGTQGRIISAKTGIPHISTGDILRQIVAKQNDEVASSIKEWMLKGELVPDEIGNPVVLRRLKEKDCEKGFILDGFPRTARQAEYLDSFLESQGRQLTAAVLLEVPEDEVVVRLLSRRVCPKCGRSFNMIFLVPKEDELCDDCGVSLVQRFDDKEETVRMRLKVYQEKTQPVIDYYSKKGILARVDGSQEIEPIVAEVLGILGVSDK

SEQ ID NO: 3167 - DNA, 693 bp, synthetic construct
  misc_feature 1..693: note = variant of adenylate kinase from Thermotoga neapolitana
  source 1..693: mol_type = other DNA
atgcaccatcatcaccatcacgggggctccggcatgggggcatatctggtgttattaggtccgccgggcgcgggaaaaggtacccaaggccgtattatttcggcaaagactggcatcccgcatattagcacgggcgatatcctgcgtcagatcgtcgctaagcaaaacgatgaagttgcgtcgagcattaaagaatggatgctgaaaggtgaactcgttccagatgaaattggtaatcctgtagtactgcgccgcctgaaggagaaagattgcgaaaaaggctttattttggatggtttcccgcgtaccgcgcgtcaagcggaatatctggatagttttcttgaatcgcagggccgccagttgacagccgccgtgctgctggaggtccccgaagatgaagttgttgtgcgtctgctgtctcgccgtgtttgtccgaaatgcgggcgtagttttaacatgatttttctggtgccaaaagaagacgagctgtgtgacgattgcggtgtcagtttagtacagcgtttcgatgataaggaagaaacggtccgtatgcgcctgaaagtctaccgggagaagacccagccggtcattgactattatgcgaagaaaggtattctcgcacgcgtagatgggagccaagaaatcgaacctatcgtggcagaagtcctggggattctgggttggatcgataag

SEQ ID NO: 3168 - protein, 231 aa, synthetic construct
  REGION 1..231: note = variant of adenylate kinase from Thermotoga neapolitana
MHHHHHHGGSGMGAYLVLLGPPGAGKGTQGRIISAKTGIPHISTGDILRQIVAKQNDEVASSIKEWMLKGELVPDEIGNPVVLRRLKEKDCEKGFILDGFPRTARQAEYLDSFLESQGRQLTAAVLLEVPEDEVVVRLLSRRVCPKCGRSFNMIFLVPKEDELCDDCGVSLVQRFDDKEETVRMRLKVYREKTQPVIDYYAKKGILARVDGSQEIEPIVAEVLGILGWIDK

SEQ ID NO: 3169 - DNA, 693 bp, synthetic construct
  misc_feature 1..693: note = variant of adenylate kinase from Thermotoga neapolitana
  source 1..693: mol_type = other DNA
atgcaccatcatcaccatcacgggggctccggcatgggggcatatctggtgttattaggtccgccgggcgcgggaaaaggtacccaaggccgtattatttcggcaaagactggcatcccgcatattagcacgggcgatatcctgcgtcagatcgtcgctaagcaaaacgatgaagttgcgtcgagcattaaagaatggatgctgaaaggtgaactcgttccagatgaaattggtaatcctgtagtactgcgccgcctgaaggagaaagattgcgaaaaaggctttattttggatggtttcccgcgtaccgcgcgtcaagcggaatatctggatagttttcttgaatcgcagggccgccagttgacagccgccgtgctgctggaggtccccgaagatgaagttgttgtgcgtctgctgtctcgccgtgtttgtccgaaatgcgggcgtagttttaacatgatttttctggtgccaaaagaagacgagctgtgtgacgattgcggtgtcccgttagtacagcgtttcgatgataaggaagaaacggtccgtatgcgcctgaaagtctaccgggagaagacccagccggtcattgactattatgcgaagaaaggtattctcgcacgcgtagatgggagccaagaaatcgaacctatcgtggcagaagtcctggggattctgggtgtgagcgataag

SEQ ID NO: 3170 - protein, 231 aa, synthetic construct
  REGION 1..231: note = variant of adenylate kinase from Thermotoga neapolitana
MHHHHHHGGSGMGAYLVLLGPPGAGKGTQGRIISAKTGIPHISTGDILRQIVAKQNDEVASSIKEWMLKGELVPDEIGNPVVLRRLKEKDCEKGFILDGFPRTARQAEYLDSFLESQGRQLTAAVLLEVPEDEVVVRLLSRRVCPKCGRSFNMIFLVPKEDELCDDCGVPLVQRFDDKEETVRMRLKVYREKTQPVIDYYAKKGILARVDGSQEIEPIVAEVLGILGVSDK

SEQ ID NO: 3171 - DNA, 693 bp, synthetic construct
  misc_feature 1..693: note = variant of adenylate kinase from Thermotoga neapolitana
  source 1..693: mol_type = other DNA
atgcaccatcatcaccatcacgggggctccggcatgggggcatatctggtgttattaggtccgccgggcgcgggaaaaggtacccaaggccgtattatttcggcaaagactggcatcccgcatattagcacgggcgatatcctgcgtcagatcgtcgctaagcaaaacgatgaagttgcgtcgagcattaaagaatggatgctgaaaggtgaactcgttccagatgaaattggtaatcctgtagtactgcgccgcctgaaggagaaagattgcgaaaaaggctttattttggatggtttcccgcgtaccgcgcgtcaagcggaatatctggatagttttcttgaatcgcagggccgccagttgacagccgccgtgctgctggaggtccccgaagatgaagttgttgtgcgtctgctgtctcgccgtgtttgtccgaaatgcgggcgtagttttaacatgatttttctggtgccaaaagaagacgagctgtgtgacgattgcggtgtcccgttagtacagcgtttcgatgataaggaagaaacggtccgtatgcgcctgaaagtctaccgggagaagacccagccggtcattgactattatgcgaagaaaggtattctcgcacgcgtagatgggagccaagaaatcgaacctatcgtggcagaagtcctggggattctgggtgtgatcgataag

SEQ ID NO: 3172 - protein, 231 aa, synthetic construct
  REGION 1..231: note = variant of adenylate kinase from Thermotoga neapolitana
MHHHHHHGGSGMGAYLVLLGPPGAGKGTQGRIISAKTGIPHISTGDILRQIVAKQNDEVASSIKEWMLKGELVPDEIGNPVVLRRLKEKDCEKGFILDGFPRTARQAEYLDSFLESQGRQLTAAVLLEVPEDEVVVRLLSRRVCPKCGRSFNMIFLVPKEDELCDDCGVPLVQRFDDKEETVRMRLKVYREKTQPVIDYYAKKGILARVDGSQEIEPIVAEVLGILGVIDK

SEQ ID NO: 3173 - DNA, 693 bp, synthetic construct
  misc_feature 1..693: note = variant of adenylate kinase from Thermotoga neapolitana
  source 1..693: mol_type = other DNA
atgcaccatcatcaccatcacgggggctccggcatgggggcatatctggtgttattaggtccgccgggcgcgggaaaaggtacccaaggccgtattatttcggcaaagactggcatcccgcatattagcacgggcgatatcctgcgtcagatcgtcgctaagcaaaacgatgaagttgcgtcgagcattaaagaatggatgctgaaaggtgaactcgttccagatgaaattggtaatcctgtagtactgcgccgcctgaaggagaaagattgcgaaaaaggctttattttggatggtttcccgcgtaccgcgcgtcaagcggaatatctggatagttttcttgaatcgcagggccgccagttgacagccgccgtgctgctggaggtccccgaagatgaagttgttgtgcgtctgctgtctcgccgtgtttgtccgaaatgcgggcgtagttttaacatgatttttctgccgccaaaagaagacgagctgtgtgacgattgcggtgtctcgttagtacagcgtttcgatgataaggaagaaacggtccgtatgcgcctgaaagtctaccaggagaagacccagccggtcattgactattatgcgaagaaaggtattctcgcacgcgtagatgggagccaagaaatcgaacctatcgtggcagaagtcctggggattctgggtgtgagcgataag

SEQ ID NO: 3174 - protein, 231 aa, synthetic construct
  REGION 1..231: note = variant of adenylate kinase from Thermotoga neapolitana
MHHHHHHGGSGMGAYLVLLGPPGAGKGTQGRIISAKTGIPHISTGDILRQIVAKQNDEVASSIKEWMLKGELVPDEIGNPVVLRRLKEKDCEKGFILDGFPRTARQAEYLDSFLESQGRQLTAAVLLEVPEDEVVVRLLSRRVCPKCGRSFNMIFLPPKEDELCDDCGVSLVQRFDDKEETVRMRLKVYQEKTQPVIDYYAKKGILARVDGSQEIEPIVAEVLGILGVSDK

SEQ ID NO: 3175 - DNA, 693 bp, synthetic construct
  misc_feature 1..693: note = variant of adenylate kinase from Thermotoga neapolitana
  source 1..693: mol_type = other DNA
atgcaccatcatcaccatcacgggggctccggcatgggggcatatctggtgttattaggtccgccgggcgcgggaaaaggtacccaaggccgtattatttcggcaaagactggcatcccgcatattagcacgggcgatatcctgcgtcagatcgtcgctaagcaaaacgatgaagttgcgtcgagcattaaagaatggatgctgaaaggtgaactcgttccagatgaaattggtaatcctgtagtactgcgccgcctgaaggagaaagattgcgaaaaaggctttattttggatggtttcccgcgtacccgccgtcaagcggaatatctggatagttttcttgaatcgcagggccgccagttgacagccgccgtgctgctggaggtccccgaagatgaagttgttgtgcgtctgctgtctcgccgtgtttgtccgaaatgcgggcgtagttttaacatgatttttctggtgccaaaagaagacgagctgtgtgacgattgcggtgtctcgttagtacagcgtttcgatgataaggaagaaacggtccgtatgcgcctgaaagtctaccaggagaagacccagccggtcattgactattattcgaagaaaggtattctcgcacgcgtagatgggagccaagaaatcgaacctatcgtggcagaagtcctggggattctgggtgtgagcgataag

SEQ ID NO: 3176 - protein, 231 aa, synthetic construct
  REGION 1..231: note = variant of adenylate kinase from Thermotoga neapolitana
MHHHHHHGGSGMGAYLVLLGPPGAGKGTQGRIISAKTGIPHISTGDILRQIVAKQNDEVASSIKEWMLKGELVPDEIGNPVVLRRLKEKDCEKGFILDGFPRTRRQAEYLDSFLESQGRQLTAAVLLEVPEDEVVVRLLSRRVCPKCGRSFNMIFLVPKEDELCDDCGVSLVQRFDDKEETVRMRLKVYQEKTQPVIDYYSKKGILARVDGSQEIEPIVAEVLGILGVSDK

SEQ ID NO: 3177 - DNA, 693 bp, synthetic construct
  misc_feature 1..693: note = variant of adenylate kinase from Thermotoga neapolitana
  source 1..693: mol_type = other DNA
atgcaccatcatcaccatcacgggggctccggcatgggggcatatctggtgttattaggtccgccgggcgcgggaaaaggtacccaaggccgtattatttcggcaaagactggcatcccgcatattagcacgggcgatatcctgcgtcagatcgtcgctaagcaaaacgatgaagttgcgtcgagcattaaagaatggatgctgaaaggtgaactcgttccagatgaaattggtaatcctgtagtactgcgccgcctgaaggagaaagattgcgaaaaaggctttattttggatggtttcccgcgtacccgccgtcaagcggaatatctggatagttttcttgaatcgcagggccgccagttgacagccgccgtgctgctggaggtccccgaagatgaagttgttgtgcgtctgctgtctcgccgtgtttgtccgaaatgcgggcgtagttttaacatgatttttctggtgccaaaagaagacgagctgtgtgacgattgcggtgtcagtttagtacagcgtttcgatgataaggaagaaacggtccgtatgcgcctgaaagtctaccgggagaagacccagccggtcattgactattattcgaagaaaggtattctcgcacgcgtagatgggagccaagaaatcgaacctatcgtggcagaagtcctggggattctgggttggagcgataag

SEQ ID NO: 3178 - protein, 231 aa, synthetic construct
  REGION 1..231: note = variant of adenylate kinase from Thermotoga neapolitana
MHHHHHHGGSGMGAYLVLLGPPGAGKGTQGRIISAKTGIPHISTGDILRQIVAKQNDEVASSIKEWMLKGELVPDEIGNPVVLRRLKEKDCEKGFILDGFPRTRRQAEYLDSFLESQGRQLTAAVLLEVPEDEVVVRLLSRRVCPKCGRSFNMIFLVPKEDELCDDCGVSLVQRFDDKEETVRMRLKVYREKTQPVIDYYSKKGILARVDGSQEIEPIVAEVLGILGWSDK

SEQ ID NO: 3179 - DNA, 693 bp, synthetic construct
  misc_feature 1..693: note = variant of adenylate kinase from Thermotoga neapolitana
  source 1..693: mol_type = other DNA
atgcaccatcatcaccatcacgggggctccggcatgggggcatatctggtgttattaggtccgccgggcgcgggaaaaggtacccaaggccgtattatttcggcaaagactggcatcccgcatattagcacgggcgatatcctgcgtcagatcgtcgctaagcaaaacgatgaagttgcgtcgagcattaaagaatggatgctgaaaggtgaactcgttccagatgaaattggtaatcctgtagtactgcgccgcctgaaggagaaagattgcgaaaaaggctttattttggatggtttcccgcgtacccgccgtcaagcggaatatctggatagttttcttgaatcgcagggccgccagttgacagccgccgtgctgctggaggtccccgaagatgaagttgttgtgcgtctgctgtctcgccgtgtttgtccgaaatgcgggcgtagttttaacatgatttttctggtgccaaaagaagacgagctgtgtgacgattgcggtgtcagtttagtacagcgtttcgatgataaggaagaaacggtccgtatgcgcctgaaagtctaccgggagaagacccagccggtcattgactattatgcgaagaaaggtattctcgcacgcgtagatgggagccaagaaatcgaacctatcgtggcagaagtcctggggattctgggtgtgagcgataag

SEQ ID NO: 3180 - protein, 231 aa, synthetic construct
  REGION 1..231: note = variant of adenylate kinase from Thermotoga neapolitana
MHHHHHHGGSGMGAYLVLLGPPGAGKGTQGRIISAKTGIPHISTGDILRQIVAKQNDEVASSIKEWMLKGELVPDEIGNPVVLRRLKEKDCEKGFILDGFPRTRRQAEYLDSFLESQGRQLTAAVLLEVPEDEVVVRLLSRRVCPKCGRSFNMIFLVPKEDELCDDCGVSLVQRFDDKEETVRMRLKVYREKTQPVIDYYAKKGILARVDGSQEIEPIVAEVLGILGVSDK

SEQ ID NO: 3181 - DNA, 693 bp, synthetic construct
  misc_feature 1..693: note = variant of adenylate kinase from Thermotoga neapolitana
  source 1..693: mol_type = other DNA
atgcaccatcatcaccatcacgggggctccggcatgggggcatatctggtgttattaggtccgccgggcgcgggaaaaggtacccaaggccgtattatttcggcaaagactggcatcccgcatattagcacgggcgatatcctgcgtcagatcgtcgctaagcaaaacgatgaagttgcgtcgagcattaaagaatggatgctgaaaggtgaactcgttccagatgaaattggtaatcctgtagtactgcgccgcctgaaggagaaagattgcgaaaaaggctttattttggatggtttcccgcgtaccgcgcgtcaagcggaatatctggatagttttcttgaatcgcagggccgccagttgacagccgccgtgctgctggaggtccccgaagatgaagttgttgtgcgtctgctgtctcgccgtgtttgtccgaaatgcgggcgtagttttaacatgatttttctggtgccaaaagaagacgagctgtgtgacgattgcggtgtctcgttagtacagcgtttcgatgataaggaagaaacggtccgtatgcgcctgaaagtctaccaggagaagacccagccggtcattgactattatgcgaagaaaggtattctcgcacgcgtagatgggagccaagaaatcgaacctatcgtggcagaagtcctggggattctgggtgtgagcgataag

SEQ ID NO: 3182 - protein, 231 aa, synthetic construct
  REGION 1..231: note = variant of adenylate kinase from Thermotoga neapolitana
MHHHHHHGGSGMGAYLVLLGPPGAGKGTQGRIISAKTGIPHISTGDILRQIVAKQNDEVASSIKEWMLKGELVPDEIGNPVVLRRLKEKDCEKGFILDGFPRTARQAEYLDSFLESQGRQLTAAVLLEVPEDEVVVRLLSRRVCPKCGRSFNMIFLVPKEDELCDDCGVSLVQRFDDKEETVRMRLKVYQEKTQPVIDYYAKKGILARVDGSQEIEPIVAEVLGILGVSDK

SEQ ID NO: 3183 - DNA, 693 bp, synthetic construct
  misc_feature 1..693: note = variant of adenylate kinase from Thermotoga neapolitana
  source 1..693: mol_type = other DNA
atgcaccatcatcaccatcacgggggctccggcatgggggcatatctggtgttattaggtccgccgggcgcgggaaaaggtacccaaggccgtattatttcggcaaagactggcatcccgcatattagcacgggcgatatcctgcgtcagatcgtcgctaagcaaaacgatgaagttgcgtcgagcattaaagaatggatgctgaaaggtgaactcgttccagatgaaattggtaatcctgtagtactgcgccgcctgaaggagaaagattgcgaaaaaggctttattttggatggtttcccgcgtacccgccgtcaagcggaatatctggatagttttcttgaatcgcagggccgccagttgacagccgccgtgctgctggaggtccccgaagatgaagttgttgtgcgtctgctgtctcgccgtgtttgtccgaaatgcgggcgtagttttaacatgatttttctggtgccaaaagaagacgagctgtgtgacgattgcggtgtcagtttagtacagcgtttcgatgataaggaagaaacggtccgtatgcgcctgaaagtctaccgggagaagacccagccggtcattgactattatgcgaagaaaggtattctcgcacgcgtagatgggagccaagaaatcgaacctatcgtggcagaagtcctggggattctgggttggagcgataag

SEQ ID NO: 3184 - protein, 231 aa, synthetic construct
  REGION 1..231: note = variant of adenylate kinase from Thermotoga neapolitana
MHHHHHHGGSGMGAYLVLLGPPGAGKGTQGRIISAKTGIPHISTGDILRQIVAKQNDEVASSIKEWMLKGELVPDEIGNPVVLRRLKEKDCEKGFILDGFPRTRRQAEYLDSFLESQGRQLTAAVLLEVPEDEVVVRLLSRRVCPKCGRSFNMIFLVPKEDELCDDCGVSLVQRFDDKEETVRMRLKVYREKTQPVIDYYAKKGILARVDGSQEIEPIVAEVLGILGWSDK

SEQ ID NO: 3185 - DNA, 693 bp, synthetic construct
  misc_feature 1..693: note = variant of adenylate kinase from Thermotoga neapolitana
  source 1..693: mol_type = other DNA
atgcaccatcatcaccatcacgggggctccggcatgggggcatatctggtgttattaggtccgccgggcgcgggaaaaggtacccaaggccgtattatttcggcaaagactggcatcccgcatattagcacgggcgatatcctgcgtcagatcgtcgctaagcaaaacgatgaagttgcgtcgagcattaaagaatggatgctgaaaggtgaactcgttccagatgaaattggtaatcctgtagtactgcgccgcctgaaggagaaagattgcgaaaaaggctttattttggatggtttcccgcgtacccgccgtcaagcggaatatctggatagttttcttgaatcgcagggccgccagttgacagccgccgtgctgctggaggtccccgaagatgaagttgttgtgcgtctgctgtctcgccgtgtttgtccgaaatgcgggcgtagttttaacatgatttttctgccgccaaaagaagacgagctgtgtgacgattgcggtgtcagtttagtacagcgtttcgatgataaggaagaaacggtccgtatgcgcctgaaagtctaccgggagaagacccagccggtcattgactattatgcgaagaaaggtattctcgcacgcgtagatgggagccaagaaatcgaacctatcgtggcagaagtcctggggattctgggtgtgagcgataag

SEQ ID NO: 3186 - protein, 231 aa, synthetic construct
  REGION 1..231: note = variant of adenylate kinase from Thermotoga neapolitana
MHHHHHHGGSGMGAYLVLLGPPGAGKGTQGRIISAKTGIPHISTGDILRQIVAKQNDEVASSIKEWMLKGELVPDEIGNPVVLRRLKEKDCEKGFILDGFPRTRRQAEYLDSFLESQGRQLTAAVLLEVPEDEVVVRLLSRRVCPKCGRSFNMIFLPPKEDELCDDCGVSLVQRFDDKEETVRMRLKVYREKTQPVIDYYAKKGILARVDGSQEIEPIVAEVLGILGVSDK

SEQ ID NO: 3187 - DNA, 693 bp, synthetic construct
  misc_feature 1..693: note = variant of adenylate kinase from Thermotoga neapolitana
  source 1..693: mol_type = other DNA
atgcaccatcatcaccatcacgggggctccggcatgggggcatatctggtgttattaggtccgccgggcgcgggaaaaggtacccaaggccgtattatttcggcaaagactggcatcccgcatattagcacgggcgatatcctgcgtcagatcgtcgctaagcaaaacgatgaagttgcgtcgagcattaaagaatggatgctgaaaggtgaactcgttccagatgaaattggtaatcctgtagtactgcgccgcctgaaggagaaagattgcgaaaaaggctttattttggatggtttcccgcgtacccgccgtcaagcggaatatctggatagttttcttgaatcgcagggccgccagttgacagccgccgtgctgctggaggtccccgaagatgaagttgttgtgcgtctgctgtctcgccgtgtttgtccgaaatgcgggcgtagttttaacatgatttttctggtgccaaaagaagacgagctgtgtgacgattgcggtgtcccgttagtacagcgtttcgatgataaggaagaaacggtccgtatgcgcctgaaagtctaccgggagaagacccagccggtcattgactattatgcgaagaaaggtattctcgcacgcgtagatgggagccaagaaatcgaacctatcgtggcagaagtcctggggattctgggttggagcgataag

SEQ ID NO: 3188 - protein, 231 aa, synthetic construct
  REGION 1..231: note = variant of adenylate kinase from Thermotoga neapolitana
MHHHHHHGGSGMGAYLVLLGPPGAGKGTQGRIISAKTGIPHISTGDILRQIVAKQNDEVASSIKEWMLKGELVPDEIGNPVVLRRLKEKDCEKGFILDGFPRTRRQAEYLDSFLESQGRQLTAAVLLEVPEDEVVVRLLSRRVCPKCGRSFNMIFLVPKEDELCDDCGVPLVQRFDDKEETVRMRLKVYREKTQPVIDYYAKKGILARVDGSQEIEPIVAEVLGILGWSDK

SEQ ID NO: 3189 - DNA, 693 bp, synthetic construct
  misc_feature 1..693: note = variant of adenylate kinase from Thermotoga neapolitana
  source 1..693: mol_type = other DNA
atgcaccatcatcaccatcacgggggctccggcatgggggcatatctggtgttattaggtccgccgggcgcgggaaaaggtacccaaggccgtattatttcggcaaagactggcatcccgcatattagcacgggcgatatcctgcgtcagatcgtcgctaagcaaaacgatgaagttgcgtcgagcattaaagaatggatgctgaaaggtgaactcgttccagatgaaattggtaatcctgtagtactgcgccgcctgaaggagaaagattgcgaaaaaggctttattttggatggtttcccgcgtacccgccgtcaagcggaatatctggatagttttcttgaatcgcagggccgccagttgacagccgccgtgctgctggaggtccccgaagatgaagttgttgtgcgtctgctgtctcgccgtgtttgtccgaaatgcgggcgtagttttaacatgatttttctggtgccaaaagaagacgagctgtgtgacgattgcggtgtcagtttagtacagcgtttcgatgataaggaagaaacggtccgtatgcgcctgaaagtctaccaggagaagacccagccggtcattgactattatgcgaagaaaggtattctcgcacgcgtagatgggagccaagaaatcgaacctatcgtggcagaagtcctggggattctgggtgtgatcgataag

SEQ ID NO: 3190 - protein, 231 aa, synthetic construct
  REGION 1..231: note = variant of adenylate kinase from Thermotoga neapolitana
MHHHHHHGGSGMGAYLVLLGPPGAGKGTQGRIISAKTGIPHISTGDILRQIVAKQNDEVASSIKEWMLKGELVPDEIGNPVVLRRLKEKDCEKGFILDGFPRTRRQAEYLDSFLESQGRQLTAAVLLEVPEDEVVVRLLSRRVCPKCGRSFNMIFLVPKEDELCDDCGVSLVQRFDDKEETVRMRLKVYQEKTQPVIDYYAKKGILARVDGSQEIEPIVAEVLGILGVIDK

SEQ ID NO: 3191 - DNA, 693 bp, synthetic construct
  misc_feature 1..693: note = variant of adenylate kinase from Thermotoga neapolitana
  source 1..693: mol_type = other DNA
atgcaccatcatcaccatcacgggggctccggcatgggggcatatctggtgttattaggtccgccgggcgcgggaaaaggtacccaaggccgtattatttcggcaaagactggcatcccgcatattagcacgggcgatatcctgcgtcagatcgtcgctaagcaaaacgatgaagttgcgtcgagcattaaagaatggatgctgaaaggtgaactcgttccagatgaaattggtaatcctgtagtactgcgccgcctgaaggagaaagattgcgaaaaaggctttattttggatggtttcccgcgtacccgccgtcaagcggaatatctggatagttttcttgaatcgcagggccgccagttgacagccgccgtgctgctggaggtccccgaagatgaagttgttgtgcgtctgctgtctcgccgtgtttgtccgaaatgcgggcgtagttttaacatgatttttctggtgccaaaagaagacgagctgtgtgacgattgcggtgtcccgttagtacagcgtttcgatgataaggaagaaacggtccgtatgcgcctgaaagtctaccaggagaagacccagccggtcattgactattatgcgaagaaaggtattctcgcacgcgtagatgggagccaagaaatcgaacctatcgtggcagaagtcctggggattctgggtgtgagcgataag

SEQ ID NO: 3192 - protein, 231 aa, synthetic construct
  REGION 1..231: note = variant of adenylate kinase from Thermotoga neapolitana
MHHHHHHGGSGMGAYLVLLGPPGAGKGTQGRIISAKTGIPHISTGDILRQIVAKQNDEVASSIKEWMLKGELVPDEIGNPVVLRRLKEKDCEKGFILDGFPRTRRQAEYLDSFLESQGRQLTAAVLLEVPEDEVVVRLLSRRVCPKCGRSFNMIFLVPKEDELCDDCGVPLVQRFDDKEETVRMRLKVYQEKTQPVIDYYAKKGILARVDGSQEIEPIVAEVLGILGVSDK

SEQ ID NO: 3193 - DNA, 18 bp, synthetic construct
  misc_feature 1..18: note = Modified oligo substrate or product
  modified_base 1: mod_base = OTHER; note = 2'-deoxythymidine with 6-carboxyfluorescein modification
  modified_base 16: mod_base = OTHER; note = 2'-methoxyguanosine
  modified_base 17: mod_base = OTHER; note = 2'-methoxyadenosine
  modified_base 18: mod_base = OTHER; note = 2'-methoxycytidine
  source 1..18: mol_type = other DNA
nttttttttttttttnnn

SEQ ID NO: 3194 - DNA, 18 bp, synthetic construct
  misc_feature 1..18: note = Modified oligo substrate or product
  modified_base 16: mod_base = OTHER; note = 2'-methoxyguanosine
  modified_base 17: mod_base = OTHER; note = 2'-methoxyadenosine
  modified_base 18: mod_base = OTHER; note = 2'-methoxycytidine
  source 1..18: mol_type = other DNA
tttttttttttttttnnn

SEQ ID NO: 3195 - DNA, 19 bp, synthetic construct
  misc_feature 1..19: note = Modified oligo substrate or product
  modified_base 1: mod_base = OTHER; note = 2'-deoxythymidine with 6-carboxyfluorescein modification
  modified_base 16: mod_base = OTHER; note = 2'-methoxyguanosine
  modified_base 17: mod_base = OTHER; note = 2'-methoxyadenosine
  modified_base 18: mod_base = OTHER; note = 2'-methoxycytidine
  modified_base 19: mod_base = OTHER; note = 2'-fluoro guanosine
  source 1..19: mol_type = other DNA
nttttttttttttttnnnn

SEQ ID NO: 3196 - DNA, 19 bp, synthetic construct
  misc_feature 1..19: note = Modified oligo substrate or product
  modified_base 16: mod_base = OTHER; note = 2'-methoxyguanosine
  modified_base 17: mod_base = OTHER; note = 2'-methoxyadenosine
  modified_base 18: mod_base = OTHER; note = 2'-methoxycytidine
  modified_base 19: mod_base = OTHER; note = 2'-fluoro guanosine
  source 1..19: mol_type = other DNA
tttttttttttttttnnnn

SEQ ID NO: 3197 - DNA, 19 bp, synthetic construct
  misc_feature 1..19: note = Modified oligo substrate or product
  modified_base 1: mod_base = OTHER; note = 2'-deoxythymidine with 6-carboxyfluorescein modification
  modified_base 16: mod_base = OTHER; note = 2'-methoxyguanosine
  modified_base 17: mod_base = OTHER; note = 2'-methoxyadenosine
  modified_base 18: mod_base = OTHER; note = 2'-methoxycytidine
  modified_base 19: mod_base = OTHER; note = 2'-methoxyuridine
  source 1..19: mol_type = other DNA
nttttttttttttttnnnn

SEQ ID NO: 3198 - DNA, 19 bp, synthetic construct
  misc_feature 1..19: note = Modified oligo substrate or product
  modified_base 16: mod_base = OTHER; note = 2'-methoxyguanosine
  modified_base 17: mod_base = OTHER; note = 2'-methoxyadenosine
  modified_base 18: mod_base = OTHER; note = 2'-methoxycytidine
  modified_base 19: mod_base = OTHER; note = 2'-methoxyuridine
  source 1..19: mol_type = other DNA
tttttttttttttttnnnn

SEQ ID NO: 3199 - DNA, 19 bp, synthetic construct
  misc_feature 1..19: note = Modified oligo substrate or product
  modified_base 1: mod_base = OTHER; note = 2'-deoxythymidine with 6-carboxyfluorescein modification
  modified_base 16: mod_base = OTHER; note = 2'-methoxyguanosine
  modified_base 17: mod_base = OTHER; note = 2'-methoxyadenosine
  modified_base 18: mod_base = OTHER; note = 2'-methoxycytidine
  modified_base 19: mod_base = OTHER; note = 2'-methoxyguanosine
  source 1..19: mol_type = other DNA
nttttttttttttttnnnn

SEQ ID NO: 3200 - DNA, 19 bp, synthetic construct
  misc_feature 1..19: note = Modified oligo substrate or product
  modified_base 16: mod_base = OTHER; note = 2'-methoxyguanosine
  modified_base 17: mod_base = OTHER; note = 2'-methoxyadenosine
  modified_base 18: mod_base = OTHER; note = 2'-methoxycytidine
  modified_base 19: mod_base = OTHER; note = 2'-methoxyguanosine
  source 1..19: mol_type = other DNA
tttttttttttttttnnnn

1. An engineered adenylate kinase comprising an amino acid sequence having at least 70%, 75%, 80%, 81%, 82%, 83%, 84%, 85%, 86%, 87%, 88%, 89%, 90%, 91%, 92%, 93%, 94%, 95%, 96%, 97%, 98%, 99%, or more sequence identity to a reference sequence corresponding to amino acid residues 12-231 of an even-numbered SEQ ID NO. of SEQ ID NOs: 2-1302, 1356-2652, and 2676-3192, or to a reference sequence corresponding to an even-numbered SEQ ID NO. of SEQ ID NOs: 2-1302, 1356-2652, and 2676-3192, wherein the amino acid sequence comprises one or more substitutions relative to a reference sequence corresponding to amino acid residues 12-231 of SEQ ID NO: 2, 4, 172, 376, 508, 524, 584, 610, 674, 816, 874, 1032, 1388, 1708, 1952, 1980, 2072, 2138, 2294, 2368, 2602, 2832, 2994, or 3104, or relative to a reference sequence corresponding to SEQ ID NO: 2, 4, 172, 376, 508, 524, 584, 610, 674, 816, 874, 1032, 1388, 1708, 1952, 1980, 2072, 2138, 2294, 2368, 2602, 2832, 2994, or 3104.

2. The engineered adenylate kinase of claim 1, comprising an amino acid sequence having at least 70%, 75%, 80%, 81%, 82%, 83%, 84%, 85%, 86%, 87%, 88%, 89%, 90%, 91%, 92%, 93%, 94%, 95%, 96%, 97%, 98%, 99%, or more sequence identity to a reference sequence corresponding to amino acid residues 12-231 of SEQ ID NO: 2, 4, 172, 376, 508, 524, 584, 610, 674, 816, 874, 1032, 1388, 1708, 1952, 1980, 2072, 2138, 2294, 2368, 2602, 2832, 2994, or 3104, or to a reference sequence corresponding to SEQ ID NO: 2, 4, 172, 376, 508, 524, 584, 610, 674, 816, 874, 1032, 1388, 1708, 1952, 1980, 2072, 2138, 2294, 2368, 2602, 2832, 2994, or 3104, wherein the amino acid sequence comprises one or more substitutions relative to the reference sequence corresponding to amino acid residues 12-231 of SEQ ID NO: 2, 4, 172, 376, 508, 524, 584, 610, 674, 816, 874, 1032, 1388, 1708, 1952, 1980, 2072, 2138, 2294, 2368, 2602, 2832, 2994, or 3104, or relative to the reference sequence corresponding to SEQ ID NO: 2, 4, 172, 376, 508, 524, 584, 610, 674, 816, 874, 1032, 1388, 1708, 1952, 1980, 2072, 2138, 2294, 2368, 2602, 2832, 2994, or 3104.

3. The engineered adenylate kinase of claim 1, comprising an amino acid sequence having at least 70%, 75%, 80%, 81%, 82%, 83%, 84%, 85%, 86%, 87%, 88%, 89%, 90%, 91%, 92%, 93%, 94%, 95%, 96%, 97%, 98%, 99%, or more sequence identity to the reference sequence corresponding to amino acid residues 12-231 of SEQ ID NO: 2, or to the reference sequence corresponding to SEQ ID NO: 2, wherein the amino acid sequence comprises one or more substitutions relative to the reference sequence corresponding to amino acid residues 12-231 of SEQ ID NO: 2, or relative to the reference sequence corresponding to SEQ ID NO: 2.

4. The engineered adenylate kinase of claim 1, comprising an amino acid sequence having at least 70%, 75%, 80%, 81%, 82%, 83%, 84%, 85%, 86%, 87%, 88%, 89%, 90%, 91%, 92%, 93%, 94%, 95%, 96%, 97%, 98%, 99%, or more sequence identity to the reference sequence corresponding to amino acid residues 12-231 of SEQ ID NO: 4, 172, 376, 508, 524, 584, 610, 674, 816, 874, 1032, 1388, 1708, 1952, 1980, 2072, 2138, 2294, 2368, 2602, 2832, 2994, or 3104, or to the reference sequence corresponding to SEQ ID NO: 4, 172, 376, 508, 524, 584, 610, 674, 816, 874, 1032, 1388, 1708, 1952, 1980, 2072, 2138, 2294, 2368, 2602, 2832, 2994, or 3104, wherein the amino acid sequence comprises one or more substitutions relative to the reference sequence corresponding to amino acid residues 12-231 of SEQ ID NO: 2, or relative to the reference sequence corresponding to SEQ ID NO: 2.

5. The engineered adenylate kinase of claim 1, comprising an amino acid sequence having at least 70%, 75%, 80%, 81%, 82%, 83%, 84%, 85%, 86%, 87%, 88%, 89%, 90%, 91%, 92%, 93%, 94%, 95%, 96%, 97%, 98%, 99%, or more sequence identity to a reference sequence corresponding to amino acid residues 12-231 of an even-numbered SEQ ID NO. of SEQ ID NOs: 4-1302, 1356-2652, and 2676-3192, or to a reference sequence corresponding to an even-numbered SEQ ID NO. of SEQ ID NOs: 4-1302, 1356-2652, and 2676-3192, wherein the amino acid sequence comprises one or more substitutions relative to the reference sequence corresponding to amino acid residues 12-231 of SEQ ID NO: 2, or relative to the reference sequence corresponding to SEQ ID NO: 2.

6. The engineered adenylate kinase of claim 1, wherein the amino acid sequence of the engineered adenylate kinase comprises at least a substitution at amino acid position 11, 13, 14, 15, 16, 18, 20, 21, 22, 26, 27, 29, 30, 31, 32, 34, 35, 36, 37, 38, 39, 40, 42, 43, 44, 46, 48, 50, 51, 52, 53, 54, 55, 56, 57, 58, 59, 60, 61, 62, 63, 64, 65, 66, 67, 68, 69, 70, 71, 73, 74, 75, 76, 77, 78, 79, 80, 81, 82, 83, 84, 87, 88, 89, 90, 91, 92, 93, 94, 97, 98, 99, 100, 101, 102, 104, 105, 108, 109, 110, 111, 112, 113, 115, 116, 117, 118, 119, 120, 122, 123, 124, 125, 126, 127, 128, 129, 131, 132, 133, 134, 135, 136, 137, 138, 139, 140, 141, 142, 143, 146, 148, 149, 150, 151, 152, 153, 154, 155, 156, 157, 161, 162, 163, 166, 168, 169, 170, 172, 173, 175, 178, 179, 180, 181, 182, 183, 184, 186, 187, 188, 190, 191, 192, 194, 195, 196, 197, 198, 199, 200, 201, 202, 203, 204, 205, 206, 207, 208, 210, 211, 212, 213, 214, 215, 216, 217, 218, 219, 220, 221, 222, 223, 224, 225, 226, 227, 228, 229, 230, or 231, or combinations thereof, wherein the amino acid positions are relative to the reference sequence corresponding to amino acid residues 12-231 of SEQ ID NO: 2, or relative to the reference sequence corresponding to SEQ ID NO: 2.

7. The engineered adenylate kinase of claim 1, wherein the amino acid sequence of the engineered adenylate kinase comprises at least a substitution or amino acid residue 11D, 13G/S, 14C/E, 15F, 16M, 18C/E/L, 20A/P/R/T/V, 21L/N/R/S/T/V, 22A/S, 26L, 27C/S, 29Q/R, 30G/L/S/Y, 31R, 32F/I/L/N, 34A/E/S/V, 35A/E/F/L/S, 36A/E/I/L/M/Q/R/S/V/Y, 37F/G/I/L/R/Y, 38C/F/L/R, 39A/M/Q/T, 40C/F/L/S/T, 42T, 43A/C/G/H/N, 445, 46E/F/L/M/Y, 48F/L, 50A/C/L/N/Q/R/S/V, 51F/G/K/L/M/R/T, 52A/H, 53A/M/S, 54G/H/I/M/Q/R/T, 55G/L/Q/S, 56E/Q/T, 57H/L/P/S, 58C/G/Y, 59E/G/H/M/P/R/T/V/W/Y, 60A/C/P/S/W, 61A/E/N/P/S/V, 62A/E/G/I/L/S, 63S, 64R, 65A/D/F/K/P/T, 66A/C/D/E/F/G/H/N/P/Q/R/S/T/V/W, 67R, 68A/D/E/G/I/L/Q/R/S/T/V/W/Y, 69F/L/Q/R/Y, 70R, 71T, 73I/R, 74C/G/Q/S, 75L, 76G/L/P, 77A/I/M/Q/S, 78C/G/N/T, 79A/K/L/P/W, 80A/D/G/L/N/P/R/S/V/W, 81F/I/L/Q/S, 82I/L/P/Q/T, 83G/H/L/S/T, 84A/E/H/M/S, 87A/E/I/K/L/M/R/V/Y, 88N/R/T, 89A/H/I/L/P/Q/T/V, 90C/E/F/K/S/T/V, 91A/F/G/L/S/V, 92L/S, 93A/E/G/P/S/T/V/Y, 94A/C/F/M/Q/S/T/V/Y, 97I, 98A/G/Q, 99A/C, 100F/S/V, 101-, 102A/C/N, 104A/F/H/I/L/Q/R/S/W, 105G/K/L/M/R/S, 108M/R/S/V, 109E/Y, 110C/F, 111E/P/R, 112A/C/E/K/M/N/Q/R/T, 113E/W/Y, 115G/K/R, 116A/E/F/L, 117L/N/S, 118A/G/L/R/S, 119F/K/L/P/R/S, 120G/K/L/R/S/T, 122A/H/S, 123S, 124V, 125I, 126A/E/S/V, 127I/L/P/S, 128C/E/I/K/N/R/S, 129I/L/P/S, 131A/G/V, 132G/K/L/T/V, 133A/E/F/L/Q/S/V/W, 134L, 135I/K/M/P/R/S, 136A/I/L/S/V/Y, 137L, 138C/I/M/V, 139A/H/L/R, 140G, 141G/V, 142F/L/M/W, 143A/C/G/P/R/S/T/V, 146D/H/N/R/V, 148F/H/M/P/Q/R/S/T, 149L, 150C/GIL/P/S/V, 151A/F/R/Y, 152F/H, 153C/K/S/V, 154Q/R, 155A/F/T/W, 156A/C/N/T/V, 157P/V, 161G/L, 162G, 163G/Q/S, 166C/F/L/P/S, 168G/L/N/Q/S, 169A/D/I/Y, 170A/G/H/P/R/S, 172A/H/M/S/T, 173F/K/R/S/T/V, 175F/L/S, 178E/G/N/R, 179A/C/G/I/L/P/V, 180G/H/P, 181C/I/V, 182A/G/I/L/Q/S, 183A/L/Q, 184I/K/M/N/R/S/T/V, 186L, 187G/Y, 188G/L, 190A/C/E/G/H/N/Q/R, 191D/K, 192A/H/I1W, 194F/L/R/V/Y, 195G/I/M/R, 196I, 197A/L/Q/V, 198G, 199R, 200A, 201A/F/K/L/S, 202E/G/M/S, 203A/E/L/R, 204R/S, 205L/P, 206W, 207A/L/T, 208E, 210V, 211A, 212C/H/I/L/M/N/P/Q/R/S/W, 213L/P/Q/S, 214A/E/L/M/P/R/T/W, 215A/P/V, 216A/D/E/G/H/L/M/N/P/R/S/T/V, 217E/G/H/P/T, 218A/I/L, 219A/F/G/L/P/S/T/W, 220E/V, 221D, 222I/T, 223T, 224G/S/T, 225A/L/Q/R/T/V, 226K/L/P/R/S/T, 227P, 228D/F/G/I/L/P/Q/R/S/T/V, 229C/I, 230A/M/P/Q, or 231A/Q/R/T, or combinations thereof, wherein the amino acid positions are relative to the reference sequence corresponding to amino acid residues 12-231 of SEQ ID NO: 2, or relative to the reference sequence corresponding to SEQ ID NO: 2.

8. The engineered adenylate kinase of claim 1, wherein the amino acid sequence of the engineered adenylate kinase comprises at least a substitution at amino acid position 13, 18, 29, 30, 31, 32, 34, 35, 48, 50, 53, 55, 59, 60, 61, 62, 66, 68, 77, 78, 80, 83, 87, 100, 104, 105, 109, 118, 119, 127, 128, 133, 136, 139, 142, 143, 150, 151, 155, 157, 168, 170, 175, 184, 186, 190, 201, 207, 212, 213, 214, 216, 217, 218, 224, or 226, or combinations thereof, wherein the amino acid positions are relative to the reference sequence corresponding to amino acid residues 12-231 of SEQ ID NO: 2, or relative to the reference sequence corresponding to SEQ ID NO: 2.

9. The engineered adenylate kinase of claim 1, wherein the amino acid sequence of the engineered adenylate kinase comprises at least a substitution or amino acid residue 13G/S, 18C/E/L, 29R/Q, 30G/L/S/Y, 31R, 32F/I/L/N, 34A/E/S/V, 35A/E/F/L/S, 48F, 50A/C/L/N/Q/R/S/V, 53A/M/S, 55G/L/Q/S, 59E/G/H/L/M/P/R/T/V/W/Y, 60A/C/P/S/W, 61A/E/N/P/S/V, 62A/E/G/I/L/S, 66A/C/D/E/F/G/H/N/P/Q/R/S/T/V/W, 68A/D/E/G/I/L/Q/R/S/T/V/W/Y, 77A/I/M/Q/S, 78C/G/N/T, 80A/D/G/L/N/P/R/S/V/W, 83G/H/L/S/T, 87A/E/I/K/L/M/R/V/Y, 100F/S/V, 104A/F/H/I/L/Q/R/S/W, 105G/K/L/M/R/S, 109E/Y, 118A/G/L/R/S, 119F/K/L/P/R/S, 127I/L/P/S, 128C/E/I/K/N/R/S, 133A/E/F/L/Q/S/V/W, 136A/I/L/S/V/Y, 139A/H/L/R, 142F/L/M/W, 143A/C/G/P/R/S/T/V, 150C/G/L/P/S/V, 151A/F/R/Y, 155A/F/T/W, 157P/V, 168G/L/N/Q/S, 170A/G/H/P/R/S, 175F/L/S, 184I/K/M/N/R/S/T/V, 186L, 190A/C/E/G/H/N/Q/R, 201A/F/K/L/S, 207A/L/T, 212C/H/I/L/M/N/P/Q/R/S/W, 213L/P/Q/S, 214A/E/L/M/P/R/T/W, 216A/E/G/H/L/M/N/P/R/S/T/V/W, 217E/G/H/P/T, 218A/I/L, 224G/S/T, or 226K/L/P/R/S/T, or combinations thereof, wherein the amino acid positions are relative to the reference sequence corresponding to amino acid residues 12-231 of SEQ ID NO: 2, or relative to the reference sequence corresponding to SEQ ID NO: 2.

10-17. (canceled)

18. The engineered adenylate kinase of claim 1, comprising an amino acid sequence having at least 70%, 75%, 80%, 81%, 82%, 83%, 84%, 85%, 86%, 87%, 88%, 89%, 90%, 91%, 92%, 93%, 94%, 95%, 96%, 97%, 98%, 99%, or more sequence identity to the reference sequence corresponding to residues 12-231 of SEQ ID NO: 4, 172, 376, 508, 524, 584, 610, 674, 816, 874, 1032, 1388, 1708, 1952, 1980, 2072, 2138, 2294, 2368, 2602, 2832, 2994, or 3104, or to the reference sequence corresponding to SEQ ID NO: 4, 172, 376, 508, 524, 584, 610, 674, 816, 874, 1032, 1388, 1708, 1952, 1980, 2072, 2138, 2294, 2368, 2602, 2832, 2994, or 3104, wherein the amino acid sequence comprises one or more substitutions relative to the reference sequence corresponding to residues 12-231 of SEQ ID NO: 4, 172, 376, 508, 524, 584, 610, 674, 816, 874, 1032, 1388, 1708, 1952, 1980, 2072, 2138, 2294, 2368, 2602, 2832, 2994, or 3104, or relative to the reference sequence corresponding to SEQ ID NO: 4, 172, 376, 508, 524, 584, 610, 674, 816, 874, 1032, 1388, 1708, 1952, 1980, 2072, 2138, 2294, 2368, 2602, 2832, 2994, or 3104.

19. The engineered adenylate kinase of claim 1, comprising an amino acid sequence having at least 70%, 75%, 80%, 81%, 82%, 83%, 84%, 85%, 86%, 87%, 88%, 89%, 90%, 91%, 92%, 93%, 94%, 95%, 96%, 97%, 98%, 99%, or more sequence identity to the reference sequence corresponding to residues 12-231 of an even-numbered SEQ ID NO. of SEQ ID NOs: 4-1302, 1356-2652, and 2676-3192, or to the reference sequence corresponding to an even-numbered SEQ ID NO. of SEQ ID NOs: 4-1302, 1356-2652, and 2676-3192, wherein the amino acid sequence comprises one or more substitutions relative to the reference sequence corresponding to residues 12-231 of SEQ ID NO: 4, 172, 376, 508, 524, 584, 610, 674, 816, 874, 1032, 1388, 1708, 1952, 1980, 2072, 2138, 2294, 2368, 2602, 2832, 2994, or 3104, or relative to the reference sequence corresponding to SEQ ID NO: 4, 172, 376, 508, 524, 584, 610, 674, 816, 874, 1032, 1388, 1708, 1952, 1980, 2072, 2138, 2294, 2368, 2602, 2832, 2994, or 3104.

20. The engineered adenylate kinase of claim 18, wherein the amino acid sequence of the engineered adenylate kinase comprises at least a substitution at amino acid position 11, 13, 14, 15, 16, 18, 20, 21, 22, 26, 27, 29, 30, 31, 32, 34, 35, 36, 37, 38, 39, 40, 42, 43, 44, 46, 48, 50, 51, 52, 53, 54, 55, 56, 57, 58, 59, 60, 61, 62, 63, 64, 65, 66, 67, 68, 69, 70, 71, 73, 74, 75, 76, 77, 78, 79, 80, 81, 82, 83, 84, 87, 88, 89, 90, 91, 92, 93, 94, 97, 98, 99, 100, 101, 102, 104, 105, 108, 109, 110, 111, 112, 113, 115, 116, 117, 118, 119, 120, 122, 123, 124, 125, 126, 127, 128, 129, 131, 132, 133, 134, 135, 136, 137, 138, 139, 140, 141, 142, 143, 146, 148, 149, 150, 151, 152, 153, 154, 155, 156, 157, 161, 162, 163, 166, 168, 169, 170, 172, 173, 175, 178, 179, 180, 181, 182, 183, 184, 186, 187, 188, 190, 191, 192, 194, 195, 196, 197, 198, 199, 200, 201, 202, 203, 204, 205, 206, 207, 208, 210, 211, 212, 213, 214, 215, 216, 217, 218, 219, 220, 221, 222, 223, 224, 225, 226, 227, 228, 229, 230, or 231, or combinations thereof, wherein the amino acid positions are relative to the reference sequence corresponding to residues 12-231 of SEQ ID NO: 4, 172, 376, 508, 524, 584, 610, 674, 816, 874, 1032, 1388, 1708, 1952, 1980, 2072, 2138, 2294, 2368, 2602, 2832, 2994, or 3104, or relative to the reference sequence corresponding to SEQ ID NO: 4, 172, 376, 508, 524, 584, 610, 674, 816, 874, 1032, 1388, 1708, 1952, 1980, 2072, 2138, 2294, 2368, 2602, 2832, 2994, or 3104.

21. The engineered adenylate kinase of claim 18, wherein the amino acid sequence of the engineered adenylate kinase comprises at least a substitution or amino acid residue 11D, 13G/S, 14C/E, 15F, 16M, 18C/E/L, 20A/P/R/T/V, 21L/N/R/S/T/V, 22A/S, 26L, 27C/S, 29Q/R, 30G/L/S/Y, 31R, 32F/I/L/N, 34A/E/S/V, 35A/E/F/L/S, 36A/E/I/L/M/Q/R/S/V/Y, 37F/G/I/L/R/Y, 38C/F/L/R, 39A/M/Q/T, 40C/F/L/S/T, 42T, 43A/C/G/H/N, 44S, 46E/F/L/M/Y, 48F/L, 50A/C/L/N/Q/R/S/V, 51F/G/K/L/M/R/T, 52A/H, 53A/M/S, 54G/H/I/M/Q/R/T, 55G/L/Q/S, 56E/Q/T, 57H/L/P/S, 58C/G/Y, 59E/G/H/M/P/R/T/V/W/Y, 60A/C/P/S/W, 61A/E/N/P/S/V, 62A/E/G/I/L/S, 63S, 64R, 65A/D/F/K/P/T, 66A/C/D/E/F/G/H/N/P/Q/R/S/T/V/W, 67R, 68A/D/E/G/I/L/Q/R/S/T/V/W/Y, 69F/L/Q/R/Y, 70R, 71T, 73I/R, 74C/G/Q/S, 75L, 76G/L/P, 77A/I/M/Q/S, 78C/G/N/T, 79A/K/L/P/W, 80A/D/G/L/N/P/R/S/V/W, 81F/I/L/Q/S, 82I/L/P/Q/T, 83G/H/L/S/T, 84A/E/H/M/S, 87A/E/I/K/L/M/R/V/Y, 88N/R/T, 89A/H/I/L/P/Q/T/V, 90C/E/F/K/S/T/V, 91A/F/G/L/S/V, 92L/S, 93A/E/G/P/S/T/V/Y, 94A/C/F/M/Q/S/T/V/Y, 97I, 98A/G/Q, 99A/C, 100F/S/V/Y, 101-, 102A/C/N, 104A/F/H/I/L/Q/R/S/W, 105G/K/L/M/R/S, 108M/R/S/V, 109E/Y, 110C/F, 111E/P/R, 112A/C/E/K/M/N/Q/R/T, 113E/W/Y, 115G/K/R, 116A/E/F/L, 117L/N/S, 118A/G/L/R/S, 119F/K/L/P/R/S, 120G/K/L/R/S/T, 122A/H/S, 1235, 124V, 125I, 126A/E/S/V, 127I/L/P/S, 128C/E/I/K/N/R/S, 129I/L/P/S, 131A/G/V, 132G/K/L/T/V, 133F/Q/S/V/W, 133A/E/F/L/Q/S/V/W, 134L, 135I/K/M/P/R/S, 136A/I/L/S/V/Y, 137L, 138C/I/M/V, 139A/H/L/R, 140G, 141G/V, 142F/L/M/W, 143A/C/G/P/R/S/T/V, 146D/H/N/R/V, 148F/H/M/P/Q/R/S/T, 149L, 150C/GIL/P/S/V, 151A/F/R/Y, 152F/H, 153C/K/S/V, 154Q/R, 155A/F/T/W, 156A/C/N/T/V, 157P/V, 161G/L, 162G, 163G/Q/S, 166C/F/L/P/S, 168G/L/N/Q/S, 169A/D/I/Y, 170A/G/H/P/R/S, 172A/H/M/S/T, 173F/K/R/S/T/V, 175F/L/S, 178E/G/N/R, 179A/C/G/I/L/P/V, 180G/H/P, 181C/I/V, 182A/G/I/L/Q/S, 183A/L/Q, 184I/K/M/N/R/S/T/V, 186L, 187G/Y, 188G/L, 190A/C/E/G/H/N/Q/R, 191D/K, 192A/H/I/W, 194F/L/R/V/Y, 195G/I/M/R, 196I, 197A/L/Q/V, 198G, 199R, 200A, 201A/F/K/L/S, 202E/G/M/S, 203A/E/L/R, 204R/S, 205L/P, 206W, 207A/L/T, 208E, 210V, 211A, 212C/H/I/L/M/N/P/Q/R/S/W, 213L/P/Q/S, 214A/E/L/M/P/R/T/W, 215A/P/V, 216A/D/E/G/H/L/M/N/P/R/S/T/V, 217E/G/H/P/T, 218A/I/L, 219A/F/G/L/P/S/T/W, 220E/V, 221D, 222I/T, 223T, 224G/S/T, 225A/L/Q/R/T/V, 226K/L/P/R/S/T, 227P, 228D/F/G/I/L/P/Q/R/S/T/V, 229C/I, 230A/M/P/Q, or 231A/Q/R/T, or combinations thereof, wherein the amino acid positions are relative to the reference sequence corresponding to residues 12-231 of SEQ ID NO: 4, 172, 376, 508, 524, 584, 610, 674, 816, 874, 1032, 1388, 1708, 1952, 1980, 2072, 2138, 2294, 2368, 2602, 2832, 2994, or 3104, or relative to the reference sequence corresponding to SEQ ID NO: 4, 172, 376, 508, 524, 584, 610, 674, 816, 874, 1032, 1388, 1708, 1952, 1980, 2072, 2138, 2294, 2368, 2602, 2832, 2994, or 3104.

22. The engineered adenylate kinase of claim 18, wherein the amino acid sequence of the engineered adenylate kinase comprises at least a substitution at amino acid position 13, 18, 29, 30, 31, 32, 34, 35, 48, 50, 53, 55, 59, 60, 61, 62, 66, 68, 77, 78, 80, 83, 87, 100, 104, 105, 109, 118, 119, 127, 128, 133, 136, 139, 142, 143, 150, 151, 155, 157, 168, 170, 175, 184, 186, 190, 201, 207, 212, 213, 214, 216, 217, 218, 224, or 226, or combinations thereof, wherein the amino acid positions are relative to the reference sequence corresponding to residues 12-231 of SEQ ID NO: 4, 172, 376, 508, 524, 584, 610, 674, 816, 874, 1032, 1388, 1708, 1952, 1980, 2072, 2138, 2294, 2368, 2602, 2832, 2994, or 3104, or relative to the reference sequence corresponding to SEQ ID NO: 4, 172, 376, 508, 524, 584, 610, 674, 816, 874, 1032, 1388, 1708, 1952, 1980, 2072, 2138, 2294, 2368, 2602, 2832, 2994, or 3104.

23. The engineered adenylate kinase of claim 18, wherein the amino acid sequence of the engineered adenylate kinase comprises at least a substitution, or amino acid residue 13G/S, 18C/E/L, 29R/Q, 30G/L/S/Y, 31R, 32F/I/L/N, 34A/E/S/V, 35A/E/F/L/S, 48F, 50A/C/L/N/Q/R/S/V, 53A/M/S, 55G/L/Q/S, 59E/G/H/L/M/P/R/T/V/W/Y, 60A/C/P/S/W, 61A/E/N/P/S/V, 62A/E/G/I/L/S, 66A/C/D/E/F/G/H/N/P/Q/R/S/T/V/W, 68A/D/E/G/I/L/Q/R/S/T/V/W/Y, 77A/I/M/Q/S, 78C/G/N/T, 80A/D/G/L/N/P/R/S/V/W, 83G/H/L/S/T, 87A/E/I/K/L/M/R/V/Y, 100F/S/V, 104A/F/H/I/L/Q/R/S/W, 105G/K/L/M/R/S, 109E/Y, 118A/G/L/R/S, 119F/K/L/P/R/S, 127I/L/P/S, 128C/E/I/K/N/R/S, 133A/E/F/L/Q/S/V/W, 136A/I/L/S/V/Y, 139A/H/L/R, 142F/L/M/W, 143A/C/G/P/R/S/T/V, 150C/G/L/P/S/V, 151A/F/R/Y, 155A/F/T/W, 157P/V, 168G/L/N/Q/S, 170A/G/H/P/R/S, 175F/L/S, 184I/K/M/N/R/S/T/V, 186L, 190A/C/E/G/H/N/Q/R, 201A/F/K/L/S, 207A/L/T, 212C/H/I/L/M/N/P/Q/R/S/W, 213L/P/Q/S, 214A/E/L/M/P/R/T/W, 216A/E/G/H/L/M/N/P/R/S/T/V/W, 217E/G/H/P/T, 218A/I/L, 224G/S/T, or 226K/L/P/R/S/T, or combinations thereof, wherein the amino acid positions are relative to the reference sequence corresponding to residues 12-231 of SEQ ID NO: 4, 172, 376, 508, 524, 584, 610, 674, 816, 874, 1032, 1388, 1708, 1952, 1980, 2072, 2138, 2294, 2368, 2602, 2832, 2994, or 3104, or relative to the reference sequence corresponding to SEQ ID NO: 4, 172, 376, 508, 524, 584, 610, 674, 816, 874, 1032, 1388, 1708, 1952, 1980, 2072, 2138, 2294, 2368, 2602, 2832, 2994, or 3104.

24-134. (canceled)

135. The engineered adenylate kinase of claim 1, having adenylate kinase activity and at least one improved property as compared to a reference adenylate kinase, wherein the improved property is selected from i) increased activity on unmodified nucleoside monophosphate (NMP), ii) increased stability, iii) increased thermostability, iv) increased activity on 2′-fluoro modified nucleoside monophosphate, and v) increased activity on 2′-O-methyl modified nucleoside monophosphate, or any combinations of i), ii), iii), iv), and v) as compared to a reference adenylate kinase, and wherein the reference adenylate kinase has an amino acid sequence corresponding to residues 12-231 of SEQ ID NO: 2, or an amino acid sequence corresponding to SEQ ID NO: 2.

136. (canceled)

137. (canceled)

138. A recombinant polynucleotide comprising a polynucleotide sequence encoding an engineered adenylate kinase of claim 1.

139-143. (canceled)

144. An expression vector comprising a recombinant polynucleotide of claim 138.

145. (canceled)

146. (canceled)

147. A host cell comprising an expression vector of claim 144.

148. (canceled)

149. (canceled)

150. A method of producing an engineered adenylate kinase polypeptide, comprising culturing a host cell of claim 147 under suitable culture conditions such that the engineered adenylate kinase polypeptide is produced.

151. (canceled)

152. (canceled)

153. A composition comprising an engineered adenylate kinase of claim 1.

154. (canceled)

155. (canceled)

156. A method of converting a nucleoside or a modified nucleoside monophosphate to the corresponding nucleoside diphosphate (NMP), comprising contacting a nucleoside monophosphate with an engineered adenylate kinase of claim 1 in the presence of phosphate donor NTP under suitable reaction conditions to convert the nucleoside monophosphate to the corresponding nucleoside diphosphate (NMP).

157-183. (canceled)
